(19) United States
(12) Patent Application Publication
(10) Pub. No.: US 2021/0040467 A1
(43) Pub. Date: Feb. 11, 2021

(54) PRODUCTION OF BOTULINUM NEUROTOXINS USING BACILLUS SYSTEMS

(71) Applicant: Children's Medical Center Corporation, Boston, MA (US)

(72) Inventors: Min Dong, Weatogue, CT (US); Liang Tao, Boston, MA (US)

(73) Assignee: Children's Medical Center Corporation, Boston, MA (US)

(21) Appl. No.: 16/965,650

(22) PCT Filed: Jan. 29, 2019
(86) PCT No.: PCT/US2019/015594

§ 371 Date: Jul. 29, 2020

Related U.S. Application Data
(60) Provisional application No. 62/623,715, filed on Jan. 30, 2018.

(51) Int. Cl. C12N 9/52; C12N 15/75

(52) U.S. Cl. CPC C12N 9/52; C12Y 304/24069; C07K 2319/20; C07K 2319/55; C12N 15/75

(57) ABSTRACT

Described herein are Bacillus cells comprising a nucleotide sequence encoding a Botulinum neurotoxin (BoNT) and methods of producing the BoNT.

### RELATED APPLICATION

[0001] This application claims the benefit under 35 U.S.C. § 119(e) to U.S. Provisional Application No. 62/623,715, filed Jan. 30, 2018, and entitled “PRODUCTION OF BOTULINUM NEUROTOXINS USING BACILLUS SYSTEMS,” the entire contents of which are incorporated herein by reference.

### BACKGROUND

[0002] Botulinum neurotoxins (BoNTs) are lethal toxins produced by Clostridium botulinum. These toxins can specifically target neuronal terminals of various vertebrates, block the neuron transmitter release, and cause flaccid paralysis usually called “botulism.” The neuron blocking activity of the BoNTs can be utilized for therapeutic purpose, especially on neuron-related diseases, such as blepharospasm, strabismus, upper motor neuron syndrome, sweating, cervical dystonia, and chronic migraine. BoNTs are also widely used in the cosmetic industry.

### SUMMARY

[0003] Some aspects of the present disclosure provide methods of producing Botulinum neurotoxins (BoNTs) recombinantly in Bacillus, the method comprising culturing a Bacillus cell comprising a nucleotide sequence encoding a BoNT, under conditions suitable for expressing the BoNT.

[0004] In some embodiments, the nucleotide sequence encoding the BoNT is operably linked to a promoter. In some embodiments, the promoter is an inducible promoter.

[0005] In some embodiments, the nucleotide sequence encoding the BoNT is in an expression vector. In some embodiments, the expression vector is selected from the group consisting of: pHT01, pHT08, pHT09, pHT10, pHT43, pHT253, pHT254, pHT 255, pNZ8901, pNZ8902, pNZ8910, pNZ8911, pWH1520, pMM1522, pMM1525, pHIS1522, pHIS1525, pSTREP1525, pSTREPHIS1525, pC-His1622, pC-Strep1622, pN-His-TEV1622, pN-Strep-TEV1622, pN-StrepXa1622, pSTOP1622, p3STOP1623 hp, pC-HIS1623 hp, pN-His-TEV1623 hp, pSP-LipA-hp, pSP-YocH-hp, p3STOP1623-2RBShp, pC-STREP1623 hp, pN-STREP-Xa1623 hp, pN-STREP_TEV1623 hp, pMGBm19, pPT7, pPT7-SPlipA, pPconst1326, pBP26, pBP27, pBQ200, pGP380, pGP382, pGP886, pGP888, pGP1459, pGP1460, pGP1389, pBE-S, and pRB374.

[0006] In some embodiments, the BoNT is fused to a fusion domain at the N- or C-terminus. In some embodiments, the fusion domain is an affinity tag. In some embodiments, the affinity tag is selected from the group consisting of: His6, GST, Avi, Strep, S, MBP, Sumo, FLAG, HA, Myc, SBP, E, Calmodulin, Softag 1, Softag 3, TC, V5, VSV, Xpress, Halo, and Fc.

[0007] In some embodiments, the nucleotide sequence encoding the BoNT is codon optimized for expression in Bacillus.

[0008] In some embodiments, the BoNT is selected from the group consisting of: BoNT/A, BoNT/B, BoNT/C, BoNT/D, BoNT/E, BoNT/F, BoNT/G, BoNT/X, BoNT/En, and variants thereof. In some embodiments, the BoNT is a catalytically inactive BoNT. In some embodiments, the BoNT is a full-length BoNT. In some embodiments, the BoNT is a chimeric BoNT. In some embodiments, the BoNT comprises an amino acid sequence that is at least 85%, at least 86%, at least 87%, at least 88%, at least 89%, at least 90%, at least 91%, at least 92%, at least 93%, at least 94%, at least 95%, at least 96%, at least 97%, at least 98%, at least 99%, or at least 99.5% identical to any one of SEQ ID NOs: 1-139. In some embodiments, the BoNT comprises the amino acid sequence of any one of SEQ ID NOs: 1-139.

[0009] In some embodiments, the method further comprises delivering the nucleotide sequence encoding the BoNT into the Bacillus cell. In some embodiments, the nucleotide sequence encoding the BoNT is delivered via transformation, transduction, conjugation, and electroporation.

[0010] In some embodiments, the method further comprises purifying the BoNT from the Bacillus cell. In some embodiments, the BoNT is purified via affinity chromatography, ion exchange chromatography, size-exclusion chromatography, or combinations thereof.

[0011] In some embodiments, the Bacillus cell is selected from the group consisting of: Bacillus subtilis, Bacillus megaterium, Bacillus anthracis, and Bacillus brevis. In some embodiments, the Bacillus cell is a wild type cell. In some embodiments, the Bacillus cell is an engineered cell. In some embodiments, the Bacillus is a protease deficient Bacillus cell.

[0012] Other aspects of the present disclosure provide a Bacillus cell comprising a nucleotide sequence encoding a Botulinum neurotoxin (BoNT). In some embodiments, the nucleotide sequence encoding the BoNT is operably linked to a promoter. In some embodiments, the promoter is an inducible promoter.

[0013] In some embodiments, the nucleotide sequence encoding the BoNT is in an expression vector. In some embodiments, the expression vector is selected from the group consisting of: pHT01, pHT08, pHT09, pHT10, pHT43, pHT253, pHT254, pHT 255, pNZ8901, pNZ8902, pNZ8910, pNZ8911, pWH1520, pMM1522, pMM1525, pHIS1522, pHIS1525, pSTREP1525, pSTREPHIS1525, pC-His1622, pC-Strep1622, pN-His-TEV1622, pN-Strep-TEV1622, pN-StrepXa1622, pSTOP1622, p3STOP1623 hp, pC-HIS1623 hp, pN-His-TEV1623 hp, pSP-LipA-hp, pSP-YocH-hp, p3STOP1623-2RBShp, pC-STREP1623 hp, pN-STREP-Xa1623 hp, pN-STREP_TEV1623 hp, pMGBm19, pPT7, pPT7-SPlipA, pPconst1326, pBP26, pBP27, pBQ200, pGP380, pGP382, pGP886, pGP888, pGP1459, pGP1460, pGP1389, pBE-S, and pRB374.

[0014] In some embodiments, the BoNT is fused to a fusion domain at the N- or C-terminus. In some embodiments, the fusion domain is an affinity tag. In some embodiments, the affinity tag is selected from the group consisting of: His6, GST, Avi, Strep, S, MBP, Sumo, FLAG, HA, Myc, SBP, E, Calmodulin, Softag 1, Softag 3, TC, V5, VSV, Xpress, Halo, and Fc.

[0015] In some embodiments, the nucleotide sequence encoding the BoNT is codon optimized for expression in Bacillus. In some embodiments, the BoNT is selected from the group consisting of: BoNT/A, BoNT/B, BoNT/C, BoNT/D, BoNT/E, BoNT/F, BoNT/G, BoNT/X, BoNT/En, and variants thereof. In some embodiments, the BoNT is a catalytically inactive BoNT. In some embodiments, the BoNT is a full-length BoNT. In some embodiments, the BoNT is a chimeric BoNT. In some embodiments, the BoNT comprises an amino acid sequence that is at least 85%, at least 86%, at least 87%, at least 88%, at least 89%, at least 90%, at least 91%, at least 92%, at least 93%, at least 94%, at least 95%, at least 96%, at least 97%, at least 98%, at least 99%, or at least 99.5% identical to any one of SEQ ID NOs: 1-139. In some embodiments, the BoNT comprises the amino acid sequence of any one of SEQ ID NOs: 1-139.

[0016] In some embodiments, the Bacillus cell is selected from the group consisting of: Bacillus subtilis, Bacillus megaterium, and Bacillus anthracis, and Bacillus brevis. In some embodiments, the Bacillus cell is a wild type cell. In some embodiments, the Bacillus cell is an engineered cell. In some embodiments, the Bacillus is a protease deficient Bacillus cell.

### BRIEF DESCRIPTION OF THE DRAWINGS

[0017] The accompanying drawings are not intended to be drawn to scale. In the drawings, each identical or nearly identical component that is illustrated in various figures is represented by a like numeral. For purposes of clarity, not every component may be labeled in every drawing. In the drawings:

[0018] FIG. 1. A rooted phylogenetic tree of Bacterial kingdom. Escherichia, Bacillus, and Clostridium genera are highlighted by boxes. Bacillus and Clostridium belong to the Firmicute phylum.

[0019] FIGS. 2A to 2B. FIG. 2A. Surface charge analysis of BoNT/A (left) and BoNT/B (right). FIG. 2B. Surface hydrophobicity analysis of BoNT/A (left) and BoNT/B (right).

[0020] FIG. 3. Western-blots showing the expression pattern of iBoNT/B in E. coli. An anti-BoNT/B polyclonal antibody was used for the detection.

[0021] FIGS. 4A to 4B. FIG. 4A. Western-blots of expression pattern of iBoNT/B in B. subtilis. FIG. 4B. Purification of iBoNT/B from B. subtilis. Both SDS-PAGE and WB are shown. An anti-BoNT/B polyclonal antibody was used for WB.

[0022] FIG. 5. Purified iBoNT/A, iBoNT/B, iBoNT/C, and iBoNT/D from B. subtilis are shown with a SDS-PAGE.

### DETAILED DESCRIPTION OF CERTAIN EMBODIMENTS

[0023] Botulinum neurotoxins (BoNTs) are lethal toxins produced by Clostridium botulinum. These toxins can specifically target neuronal terminals of various vertebrates, block the neuron transmitter release, and cause flaccid paralysis usually called “botulism”. On the other hand, this property of the toxins can be utilized for therapeutic purpose, especially for neuron-related diseases. Starting from the 1960s, the efficacy of BoNTs in treating neuronal diseases has been explored and BoNTs are now widely used to treat a number of neuronal diseases including, without limitation, blepharospasm, strabismus, upper motor neuron syndrome, sweating, cervical dystonia, and chronic migraine. BoNTs are also widely used in the cosmetic industry. In December 1989, BOTOX, the first BoNT product, was proved by US Food and Drug Administration (FDA) for clinical treatment.

[0024] All commercial BoNT products for medical and cosmetic purpose are purified from their natural host C. botulinum. The procedure is time consuming and costly. Moreover, genetic operation is extremely difficult in C. botulinum, which is always an obstacle for developing engineered full length BoNTs. Escherichia coli cells are most commonly used bacterial hosts for expressing engineered proteins. After testing expression and production of BoNTs in E. coli, it was found that E. coli lack the ability to well express large proteins like BoNTs, especially for certain subtypes and engineered/chimeric toxins, which could be a hindrance for large-scale industrial production.

[0025] Provided herein are Bacillus cells comprising a nucleotide sequence encoding a Botulinum neurotoxin (BoNT) and methods of producing the BoNT by culturing said Bacillus cell under conditions suitable for expressing the BoNT.

[0026] “Botulinum neurotoxins (BoNTs),” as described herein, refer to a family of bacterial toxins that act by blocking neurotransmitter release from neurons, thus causing paralysis. As described herein, the term “BoNT” encompasses neurotoxins produced by Clostridium Botulinum and by other bacterial species but structurally and functionally belong to the BoNT family, and any fragments or variants thereof. BoNTs produced by Clostridium Botulinum include eight major serotypes: BoNT/A-G (e.g., as described in Schiavo et al., Physiol Rev 80, 717-766 (2000), incorporated herein by reference), and BoNT/X (e.g., as described in Zhang et al., Nature Communications, 8, Article number: 14130 (2017), incorporated herein by reference). Each BoNT serotype may have subtypes. For example, BoNT/A has 8 subtypes, BoNT/A1, BoNT/A2, BoNT/A3, BoNT/A4, BoNT/A5, BoNT/A6, BoNT/A7, and BoNT/A8. Similarly, BoNT/B also has 8 subtypes, BoNT/B1, BoNT/B2, BoNT/B3, BoNT/B4, BoNT/B5, BoNT/B6, BoNT/B7, and BoNT/B8. It has been found that bacterial species other than Clostridium Botulinum also produce neurotoxins that belong to the BoNT family, i.e., have similar structure or function as a BoNT produced by Clostridium Botulinum. For example, a BoNT family neurotoxin was identified in Enterococcus faecium and was designated “BoNT/En” (e.g., as described in Zhang et al., 2018, Cell Host and Microbe, 23: 1-8, Doi:10.1016/j.chom.2017.12.018, incorporated herein by reference).

[0027] In some embodiments, the BoNT is a full-length BoNT. A “full-length” BoNT refers to a BoNT that does not have any truncations, compared to a wild-type BoNT. A full-length BoNT may contain other types of mutations, compared to a wild-type BoNT, e.g., amino acid substitutions or fusion domains. In some embodiments, the BoNT is a naturally occurring, wild-type BoNT, e.g., any of the BoNTs described herein and known in the art. In some embodiments, the BoNT is a variant of a wild-type BoNT. BoNT variants have been previously described. For example, BoNT variants that have enhanced binding to target cells are described in PCT Application Publication WO 2017214447, incorporated herein by reference. In another example, the BoNT is a catalytically inactive variant, e.g., as described in PCT Application Publication WO 2018009903, incorporated herein by reference.

[0028] A BoNT comprises a heavy chain (herein termed “BoNT-HC”) and a light chain (herein termed “BoNT-LC”) linked by a linker region. A proteolytic cleavage occurs in the linker region when a BoNT is processed into its mature form. The BoNT-LC comprises a protease domain that cleaves the substrates of the BoNT, while the BoNT-HC comprises a translocation domain at the N terminus of the heavy chain (H_{N}) and a receptor binding domain at the C terminus of the heavy chain (H_{C}), which mediate the entering of the BoNT into a cell. It has been shown that chimeric BoNTs can exert the function of a naturally occurring BoNT. A “chimeric BoNT” refers to a BoNT comprising domains from different BoNT serotypes. In some embodiments, a chimeric BoNT may contain the protease domain (LC) and the translocation domain (H_{N}) from one BoNT (e.g., any one of BoNT/A-G, BoNT/X, and BoNT/En) and the receptor binding domain (H_{C}) from a different BoNT (e.g., from any one of BoNT/A-G, BoNT/X, and BoNT/En, except where the LC and H_{N} are from). In some embodiments, a chimeric BoNT comprises other variations, e.g., amino acid substations. Non-limiting, exemplary chimeric BoNTs are provided in Table 1.

[0029] In some embodiments, the BoNT produced using the method described herein comprises an amino acid sequence that is at least 85%, at least 86%, at least 87%, at least 88%, at least 89%, at least 90%, at least 91%, at least 92%, at least 93%, at least 94%, at least 95%, at least 96%, at least 97%, at least 98%, at least 99%, or at least 99.5% identical to any one of SEQ ID NOs: 1-139. In some embodiments, the BoNT produced using the method described herein comprises the amino acid sequence of any one of SEQ ID NOs: 1-139. In some embodiments, the BoNT produced using the method described herein consists of the amino acid sequence of any one of SEQ ID NOs: 1-139. Non-limiting, exemplary amino acid sequences of the BoNTs that can be produced using the methods described herein are provided in Table 1.

[0030] In some embodiments, the BoNT is fused to a fusion domain at the N- or C-terminus. A “fusion domain” refers to a polypeptide sequence that is appended to the BoNT via an amide bond. In some embodiments, the fusion domain is an affinity tag. An “affinity tag,” as used herein, refers to a polypeptide sequence that can bind specifically to a substance or a moiety, e.g., a tag comprising six Histidines bind specifically to Ni²⁺. Affinity tags may be appended to proteins to facilitate their isolation. The affinity tags are typically fused to proteins via recombinant DNA techniques known by those skilled in the art. The use of affinity tags to facilitate protein isolate is also well known in the art. Suitable affinity tags that may be used in accordance with the present disclosure include, without limitation, His6, GST, Avi, Strep, S, MBP, Sumo, FLAG, HA, Myc, SBP, E, Calmodulin, Softag 1, Softag 3, TC, V5, VSV, Xpress, Halo, and Fc.

[0031] Other aspects of the present disclosure provide nucleotide sequences encoding the BoNTs described herein. A “nucleotide sequence” is at least two nucleotides covalently linked together, and in some instances, may contain phosphodiester bonds (e.g., a phosphodiester “backbone”). A nucleotide sequence may be DNA, both genomic and/or cDNA, RNA or a hybrid, where the nucleotide sequence contains any combination of deoxyribonucleotides and ribonucleotides (e.g., artificial or natural), and any combination of bases, including uracil, adenine, thymine, cytosine, guanine, inosine, xanthine, hypoxanthine, isocytosine and isoguanine.

[0032] In some embodiments, the nucleotide sequence encoding the BoNT is at least 85%, at least 86%, at least 87%, at least 88%, at least 89%, at least 90%, at least 91%, at least 92%, at least 93%, at least 94%, at least 95%, at least 96%, at least 97%, at least 98%, at least 99%, or at least 99.5%, or 100% identical to any one of SEQ ID NOs: 1-139. In some embodiments, the nucleotide sequence encoding the BoNT is 85%, 86%, 87%, 88%, 89%, 90%, 91%, 92%, 93%, 94%, 95%, 96%, 97%, 98%, 99%, or 100% identical to any one of SEQ ID NOs: 1-139.

[0033] In some embodiments, the nucleotide sequence encoding the BoNT is codon optimized for expression in a Bacillus cell. Codon optimization methods are known in the art and may be used as provided herein. Codon optimization, in some embodiments, may be used to match codon frequencies in target and host organisms to ensure proper folding; bias GC content to increase mRNA stability or reduce secondary structures; minimize tandem repeat codons or base runs that may impair gene construction or expression; customize transcriptional and translational control regions; insert or remove protein trafficking sequences; remove/add post translation modification sites in encoded protein (e.g. glycosylation sites); add, remove or shuffle protein domains; insert or delete restriction sites; modify ribosome binding sites and mRNA degradation sites; adjust translational rates to allow the various domains of the protein to fold properly; or to reduce or eliminate problem secondary structures within the polynucleotide. Codon optimization tools, algorithms and services are known in the art—non-limiting examples include services from GeneArt (Life Technologies), DNA2.0 (Menlo Park Calif.) and/or proprietary methods. In some embodiments, the open reading frame (ORF) sequence is optimized using optimization algorithms.

[0034] In some embodiments, a codon optimized sequence shares less than 95%, less than 90%, less than 85%, less than 80%, less than 75%, less than 70%, less than 65%, or less than 60% sequence identity to a naturally-occurring or wild-type sequence (e.g., a naturally-occurring or wild-type mRNA sequence encoding a BoNT). In some embodiments, a codon optimized sequence shares 60%, 61%, 62%, 63%, 64%, 65%, 66%, 67%, 68%, 69%, 70%, 71%, 72%, 73%, 74%, 75%, 76%, 77%, 78%, 79%, 80%, 81%, 82%, 83%, 84%, 85%, 86%, 87%, 88%, 89%, 90%, 91%, 92%, 93%, 94%, 95%, 96%, 97%, 98%, or 99% sequence identity to a naturally-occurring or wild-type sequence (e.g., a naturally-occurring or wild-type mRNA sequence encoding a BoNT).

[0035] In some embodiments, the nucleotide sequence encoding the BoNT is operably linked to a promoter. A “promoter” refers to a control region of a nucleotide sequence at which initiation and rate of transcription of the remainder of a nucleotide sequence are controlled. A promoter drives expression or drives transcription of the nucleotide sequence that it regulates. A promoter may also contain sub-regions at which regulatory proteins and molecules may bind, such as RNA polymerase and other transcription factors. Promoters may be constitutive, inducible, activatable, repressible, tissue-specific or any combination thereof. A promoter is considered to be “operably linked” when it is in a correct functional location and orientation in relation to a nucleotide sequence it regulates to control (“drive”) transcriptional initiation and/or expression of that sequence.

[0036] A promoter may be one naturally associated with a gene or sequence, as may be obtained by isolating the 5′ non-coding sequences located upstream of the coding segment of a given gene or sequence. Such a promoter can be referred to as “endogenous.”

[0037] In some embodiments, a coding nucleotide sequence may be positioned under the control of a recombinant or heterologous promoter, which refers to a promoter that is not normally associated with the encoded sequence in its natural environment. Such promoters may include promoters of other genes; promoters isolated from any other cell; and synthetic promoters or enhancers that are not “naturally occurring” such as, for example, those that contain different elements of different transcriptional regulatory regions and/or mutations that alter expression through methods of genetic engineering that are known in the art. In addition to producing nucleic acid sequences of promoters and enhancers synthetically, sequences may be produced using recombinant cloning and/or nucleic acid amplification technology, including polymerase chain reaction (PCR) (see U.S. Pat. Nos. 4,683,202 and 5,928,906).

[0038] In some embodiments, a promoter is an “inducible promoter,” which refers to a promoter that is characterized by regulating (e.g., initiating or activating) transcriptional activity when in the presence of, influenced by or contacted by an inducer signal. An inducer signal may be endogenous or a normally exogenous condition (e.g., light), compound (e.g., chemical or non-chemical compound) or protein that contacts an inducible promoter in such a way as to be active in regulating transcriptional activity from the inducible promoter. Thus, a “signal that regulates transcription” of a nucleic acid refers to an inducer signal that acts on an inducible promoter. A signal that regulates transcription may activate or inactivate transcription, depending on the regulatory system used. Activation of transcription may involve directly acting on a promoter to drive transcription or indirectly acting on a promoter by inactivation a repressor that is preventing the promoter from driving transcription. Conversely, deactivation of transcription may involve directly acting on a promoter to prevent transcription or indirectly acting on a promoter by activating a repressor that then acts on the promoter. In some embodiments, using inducible promoters in the genetic circuits of the cell state classifier results in the conditional expression or a “delayed” expression of a gene product.

[0039] The administration or removal of an inducer signal results in a switch between activation and inactivation of the transcription of the operably linked nucleotide sequence. Thus, the active state of a promoter operably linked to a nucleotide sequence refers to the state when the promoter is actively regulating transcription of the nucleotide sequence (i.e., the linked nucleotide sequence is expressed). Conversely, the inactive state of a promoter operably linked to a nucleotide sequence refers to the state when the promoter is not actively regulating transcription of the nucleotide sequence (i.e., the linked nucleotide sequence is not expressed).

[0040] An inducible promoter of the present disclosure may be induced by (or repressed by) one or more physiological condition(s), such as changes in light, pH, temperature, radiation, osmotic pressure, saline gradients, cell surface binding, and the concentration of one or more extrinsic or intrinsic inducing agent(s). An extrinsic inducer signal or inducing agent may comprise, without limitation, amino acids and amino acid analogs, saccharides and polysaccharides, nucleic acids, protein transcriptional activators and repressors, cytokines, toxins, petroleum-based compounds, metal containing compounds, salts, ions, enzyme substrate analogs, hormones or combinations thereof.

[0041] Inducible promoters of the present disclosure include any inducible promoter described herein or known to one of ordinary skill in the art. Examples of inducible promoters include, without limitation, chemically/biochemically-regulated and physically-regulated promoters such as alcohol-regulated promoters, tetracycline-regulated promoters (e.g., anhydrotetracycline (aTc)-responsive promoters and other tetracycline-responsive promoter systems, which include a tetracycline repressor protein (tetR), a tetracycline operator sequence (tetO) and a tetracycline transactivator fusion protein (tTA)), steroid-regulated promoters (e.g., promoters based on the rat glucocorticoid receptor, human estrogen receptor, moth ecdysone receptors, and promoters from the steroid/retinoid/thyroid receptor superfamily), metal-regulated promoters (e.g., promoters derived from metallothionein (proteins that bind and sequester metal ions) genes from yeast, mouse and human), pathogenesis-regulated promoters (e.g., induced by salicylic acid, ethylene or benzothiadiazole (BTH)), temperature/heat-inducible promoters (e.g., heat shock promoters), and light-regulated promoters (e.g., light responsive promoters from plant cells).

[0042] In some embodiments, an inducer signal of the present disclosure is an N-acyl homoserine lactone (AHL), which is a class of signaling molecules involved in bacterial quorum sensing. Quorum sensing is a method of communication between bacteria that enables the coordination of group based behavior based on population density. AHL can diffuse across cell membranes and is stable in growth media over a range of pH values. AHL can bind to transcriptional activators such as LuxR and stimulate transcription from cognate promoters.

[0043] In some embodiments, an inducer signal of the present disclosure is anhydrotetracycline (aTc), which is a derivative of tetracycline that exhibits no antibiotic activity and is designed for use with tetracycline-controlled gene expression systems, for example, in bacteria.

[0044] In some embodiments, an inducer signal of the present disclosure is isopropyl β-D-1-thiogalactopyranoside (IPTG), which is a molecular mimic of allolactose, a lactose metabolite that triggers transcription of the lac operon, and it is therefore used to induce protein expression where the gene is under the control of the lac operator. IPTG binds to the lac repressor and releases the tetrameric repressor from the lac operator in an allosteric manner, thereby allowing the transcription of genes in the lac operon, such as the gene coding for beta-galactosidase, a hydrolase enzyme that catalyzes the hydrolysis of β-galactosides into monosaccharides. The sulfur (S) atom creates a chemical bond which is non-hydrolyzable by the cell, preventing the cell from metabolizing or degrading the inducer. IPTG is an effective inducer of protein expression, for example, in the concentration range of 100 μM to 1.0 mM. Concentration used depends on the strength of induction required, as well as the genotype of cells or plasmid used. If lacIq, a mutant that over-produces the lac repressor, is present, then a higher concentration of IPTG may be necessary. In blue-white screen, IPTG is used together with X-gal. Blue-white screen allows colonies that have been transformed with the recombinant plasmid rather than a non-recombinant one to be identified in cloning experiments.

[0045] Other inducible promoter systems are known in the art and may be used in accordance with the present disclosure.

[0046] In some embodiments, inducible promoters of the present disclosure are from prokaryotic cells (e.g., bacterial cells). Examples of inducible promoters for use prokaryotic cells include, without limitation, bacteriophage promoters (e.g. Pls1con, T3, T7, SP6, PL) and bacterial promoters (e.g., Pbad, PmgrB, Ptrc2, Plac/ara, Ptac, Pm), or hybrids thereof (e.g. PLlacO, PLtetO). Examples of bacterial promoters for use in accordance with the present disclosure include, without limitation, positively regulated E. coli promoters such as positively regulated σ70 promoters (e.g., inducible pBad/araC promoter, Lux cassette right promoter, modified lamdba Prm promote, plac Or2-62 (positive), pBad/AraC with extra REN sites, pBad, P(Las) TetO, P(Las) CIO, P(Rhl), Pu, FecA, pRE, cadC, hns, pLas, pLux), σS promoters (e.g., Pdps), σ32 promoters (e.g., heat shock) and σ54 promoters (e.g., glnAp2); negatively regulated E. coli promoters such as negatively regulated σ70 promoters (e.g., Promoter (PRM+), modified lamdba Prm promoter, TetR-TetR-4C P(Las) TetO, P(Las) CIO, P(Lac) IQ, RecA_DlexO_DLacO1, dapAp, FecA, Pspac-hy, pcI, plux-cI, plux-lac, CinR, CinL, glucose controlled, modified Pr, modified Prm+, FecA, Pcya, rec A (SOS), Rec A (SOS), EmrR_regulated, BetI_regulated, pLac_lux, pTet_Lac, pLac/Mnt, pTet/Mnt, LsrA/cI, pLux/cI, LacI, LacIQ, pLacIQ1, pLas/cI, pLas/Lux, pLux/Las, pRecA with LexA binding site, reverse BBa_R0011, pLacI/ara-1, pLacIq, rrnB P1, cadC, hns, PfhuA, pBad/araC, nhaA, OmpF, RcnR), σS promoters (e.g., Lutz-Bujard LacO with alternative sigma factor σ38), σ32 promoters (e.g., Lutz-Bujard LacO with alternative sigma factor σ32), and σ54 promoters (e.g., glnAp2); negatively regulated B. subtilis promoters such as repressible B. subtilis GA promoters (e.g., Gram-positive IPTG-inducible, Xyl, hyper-spank) and GB promoters. Other inducible microbial promoters may be used in accordance with the present disclosure.

[0047] The efficiency of expression may be enhanced by the inclusion of appropriate transcription enhancer elements, transcription terminators, etc. In addition, a host cell strain (e.g., Bacillus) may be chosen which modulates the expression of the inserted sequences, or modifies and processes the gene product in the specific fashion desired. Such modifications (e.g., glycosylation) and processing (e.g., cleavage) of protein products may be important for the function of the protein. For example, the BoNT described herein is expressed as a single gene product (e.g., as a single polypeptide chain), and is then proteolytic cleavage in the linker region to be processed into its mature form.

[0048] In some embodiments, the nucleotide sequence encoding the BoNT is incorporated into vectors (e.g., cloning vectors or expression vectors). A “vector” refers to a nucleic acid (e.g., DNA) used as a vehicle to artificially carry genetic material (e.g., an engineered nucleic acid) into a cell where, for example, it can be replicated and/or expressed. In some embodiments, a vector is an episomal vector (see, e.g., Van Craenenbroeck K. et al. Eur. J. Biochem. 267, 5665, 2000, incorporated by reference herein). A non-limiting example of a vector is a plasmid. Plasmids are double-stranded generally circular DNA sequences that are capable of automatically replicating in a host cell. Plasmid vectors typically contain an origin of replication that allows for semi-independent replication of the plasmid in the host and also the transgene insert. Plasmids may have more features, including, for example, a “multiple cloning site,” which includes nucleotide overhangs for insertion of a nucleic acid insert, and multiple restriction enzyme consensus sites to either side of the insert. Another non-limiting example of a vector is a viral vector (e.g., retroviral, adenoviral, adeno-association, helper-dependent adenoviral systems, hybrid adenoviral systems, herpes simplex, pox virus, lentivirus, Epstein-Barr virus). In some embodiments, the viral vector is derived from an adeno-associated virus (AAV). In some embodiments, the viral vector is derived from an herpes simplex virus (HSV).

[0049] Additionally, the vector may contain, for example, some or all of the following: a selectable marker gene, e.g., genes that confer antibiotic resistance to the Bacillus cell. Suitable vectors and methods for producing vectors containing transgenes are well known and available in the art.

[0050] In bacterial systems, a number of expression vectors may be advantageously selected depending upon the use intended for the polypeptides being expressed. For example, when a large quantity of such a protein is to be produced, for the generation of pharmaceutical compositions of polypeptides described herein, vectors which direct the expression of high levels of fusion protein products that are readily purified may be desirable. Such vectors include, but are not limited, to the E. coli expression vector pUR278 (Rüther et al. (1983) “Easy Identification Of cDNA Clones,” EMBO J. 2:1791-1794), in which the coding sequence may be ligated individually into the vector in frame with the lac Z coding region so that a fusion protein is produced; pIN vectors (Inouye et al. (1985) “Up-Promoter Mutations In The 1pp Gene Of Escherichia Coli,” Nucleic Acids Res. 13:3101-3110; Van Heeke et al. (1989) “Expression Of Human Asparagine Synthetase In Escherichia Coli,” J. Biol. Chem. 24:5503-5509); and the like. pGEX vectors may also be used to express foreign polypeptides as fusion proteins with glutathione S-transferase (GST). In general, such fusion proteins are soluble and can easily be purified from lysed cells by adsorption and binding to a matrix glutathione-agarose beads followed by elution in the presence of free glutathione.

[0051] The pGEX vectors are designed to include thrombin or factor Xa protease cleavage sites so that the cloned target gene product can be released from the GST moiety. In an insect system, Autographa californica nuclear polyhedrosis virus (AcNPV) is used as a vector to express foreign genes. The virus grows in Spodoptera frugiperda cells. The coding sequence may be cloned individually into non-essential regions (e.g., the polyhedrin gene) of the virus and placed under control of an AcNPV promoter (e.g., the polyhedrin promoter).

[0052] In some embodiments, the vectors are adapted for expressing the BoNT in a Bacillus cell. Expression vectors suitable for expressing proteins (e.g., BoNT) in a Bacillus cell are commercially available. For example, Mibitec GmbH (Germany) provides numberous expression vectors suitable for protein expression in Bacillus, including, pHT01 (#PBS001), pHT08 (#PBS003), pHT09 (#PBS004), pHT10 (#PBS005), pHT43 (#PBS002), pHT253 (#PBS013), pHT254 (#PBS014), pHT255 (#PBS015), pNZ8901 (#PBS031), pNZ8902 (#PBS032), pNZ8910 (#PBS033), pNZ8911 (#PBS034), pWH1520 (#BMEG03), pMM1522 (#BMEG10), pMM1525 (#BMEG 11), pHIS1522 (#BMEG 12), pHIS1525 (#BMEG 13), pSTREP1525 (#BMEG 14), pSTREPHIS1525 (#BMEG 15), pC-His1622 (#BMEG 20), pC-Strep1622 (#BMEG 21), pN-His-TEV1622 (#BMEG 22), pN-Strep-TEV1622 (#BMEG 23), pN-StrepXa1622 (#BMEG 24), pSTOP1622 (#BMEG 25), p3STOP1623 hp (#BMEG 30), pC-HIS1623 hp (#BMEG31), pN-His-TEV1623 hp (#BMEG 32), pSP-LipA-hp (#BMEG 33), pSP-YocH-hp (#BMEG 34), p3STOP1623-2RBShp (#BMEG 35), pC-STREP1623 hp (#BMEG 36), pN-STREP-Xa1623 hp (#BMEG 37), pN-STREP_TEV1623 hp (#BMEG 38), pMGBm19 (#BMEG 39), pPT7 (#BMEG T710), pPT7-SPlipA (#BMEG T711), and pPconst1326 (#BMEG 45). Takara Bio Inc. (Japan) provides a Bacillus subtilis secretory protein expression system (#3380) including an expression vector pBES. Further, ATCC provides vector pRB374 (#ATCC77374) for Bacillus expression. One skilled in the art is able to choose the appropriate expression vector.

[0053] The method of producing a BoNT described herein comprises culturing a Bacillus cell comprising the nucleotide sequence encoding the BoNT under conditions suitable for expressing the BoNT. In some embodiments, the method further comprises delivering the nucleotide sequence encoding the BoNT to a Bacillus cell. Standard molecular biology techniques are used to prepare and deliver the recombinant expression vector, and culture the Bacillus cells. An expression vector comprising the nucleotide sequence encoding the BoNT can be transferred to a host cell by conventional techniques (e.g., electroporation, transformation, transduction, or conjugation) and the resulting Bacillus cells are then cultured by conventional techniques to produce the BoNT described herein.

[0054] The Bacillus cells may be cultured at an appropriate temperature (e.g., 16° C.-42° C.) for an appropriate amount of time (e.g., 4-72 hours). In some embodiments, the Bacillus cells are cultured at 16, 18, 20, 25, 30, 35, 37, 40, or 42° C. In some embodiments, the Bacillus cells are cultured for 4, 5, 6, 7, 8, 9, 10, 11, 12, 13, 14, 15, 16, 17, 18, 19, 20, 21, 22, 23, 24, 36, 48, 60, 72 hours or longer. Any standard culturing media (e.g., Luria-Bertani (LB) media) suitable for Bacillus cells can be used. If the expression of the BoNT is driven by an inducible promoter, the media may further contain an inducer at an appropriate concentration that activates the inducible promoter.

[0055] Once the BoNT has been recombinantly expressed, it may be purified by any method known in the art for example, by chromatography (e.g., affinity chromatography, ion exchange chromatography, size-exclusion chromatography, or combinations thereof), centrifugation, differential solubility, or by any other standard technique for the purification of polypeptides.

[0056] The BoNT produced using the method described herein is substantially free of (e.g., at least 80%, 90%, 95%, 97%, 99%, or 99.5% free of), other protein(s) and/or other polypeptide(s) (e.g., other Bacillus proteins). In some embodiments, the isolated polypeptides is 100% free of other protein(s) and/or other polypeptide(s) (e.g., Bacillus proteins). The methods described herein provide high yield of intact BoNTs. Being “intact” means that the BoNT products are substantially free of truncated products (e.g., those produced due to aborted translation or protease cleavage). As demonstrated herein, in some embodiments, about 5-10 mg protein can be obtained from one litter LB cultured B. subtilis.

[0057] The BoNT produced using the methods herein have comparable biological activities as a naturally occurring BoNT (e.g., in target cell recognition, translocation, and/or substrate cleavage). Having “comparable biological activity” means that the BoNT produced using the methods described herein are have at least 50%, at least 60%, at least 70%, at least 80%, at least 90%, at least 95%, or at least 99% of the biological activity (e.g., in target cell recognition, translocation, and substrate cleavage) of a naturally occurring BoNT. In some embodiments, the BoNT produced using the methods described herein are have 50%, 55%, 60%, 65%, 70%, 75%, 80%, 85%, 90%, 95%, 99% or more of the biological activity (e.g., in target cell recognition, translocation, and substrate cleavage) of a naturally occurring BoNT.

[0058] The host cells used for BoNT expression in the methods described herein are Bacillus cells. Exemplary Bacillus cells that may be used include, without limitation: B. acidiceler, B. acidicola, B. acidiproducens, B. acidocaldarius, B. acidoterrestris, B. aeolius, B. aerius, B. aerophilus, B. agaradhaerens, B. agri, B. aidingensis, B. akibai, B. alcalophilus, B. algicola, B. alginolyticus, B. alkalidiazotrophicus, B. alkalinitrilicus, B. alkalisediminis, B. alkalitelluris, B. altitudinis, B. alveayuensis, B. alvei, B. amyloliquefaciens, B. aminovorans[2], B. amylolyticus, B. andreesenii, B. aneurinilyticus, B. anthracis, B. aquimaris, B. arenosi, B. arseniciselenatis, B. arsenicus, B. aurantiacus, B. arvi, B. aryabhattai, B. asahii, B. atrophaeus, B. axarquiensis, B. azotofixans, B. azotoformans, B. badius, B. barbaricus, B. bataviensis, B. beijingensis, B. benzoevorans, B. beringensis, B. berkeleyi, B. beveridgei, B. bogoriensis, B. boroniphilus, B. borstelensis, B. brevis Migula, B. butanolivorans, B. canaveralius, B. carboniphilus, B. cecembensis, B. cellulosilyticus, B. centrosporus, B. cereus, B. chagannorensis, B. chitinolyticus, B. chondroitinus, B. choshinensis, B. chungangensis, B. cibi, B. circulans, B. clarkii, B. clausii, B. coagulans, B. coahuilensis, B. cohnii, B. composti, B. curdlanolyticus, B. cycloheptanicus, B. cytotoxicus, B. daliensis, B. decisifrondis, B. decolorationis, B. deserti, B. dipsosauri, B. drentensis, B. edaphicus, B. ehimensis, B. eiseniae, B. enclensis, B. endophyticus, B. endoradicis, B. farraginis, B. fastidiosus, B. fengqiuensis, B. firmus, B. flexus, B. foraminis, B. fordii, B. formosus, B. fortis, B. fumarioli, B. funiculus, B. fusiformis, B. galactophilus, B. galactosidilyticus, B. galliciensis, B. gelatini, B. gibsonii, B. ginsengi, B. ginsengihumi, B. ginsengisoli, B. glucanolyticus, B. gordonae, B. gottheilii, B. graminis, B. halmapalus, B. haloalkaliphilus, B. halochares, B. halodenitrificans, B. halodurans, B. halophilus, B. halosaccharovorans, B. hemicellulosilyticus, B. hemicentroti, B. herbersteinensis, B. horikoshii, B. horneckiae, B. horti, B. huizhouensis, B. humi, B. hwajinpoensis, B. idriensis, B. indicus, B. infantis, B. infernus, B. insolitus, B. invictae, B. iranensis, B. isabeliae, B. isronensis, B. jeotgali, B. kaustophilus, B. kobensis, B. kochii, B. kokeshiiformis, B. koreensis, B. korlensis, B. kribbensis, B. krulwichiae, B. laevolacticus, B. larvae, B. laterosporus, B. lautus, B. lehensis, B. lentimorbus, B. lentus, B. licheniformis, B. ligniniphilus, B. litoralis, B. locisalis, B. luciferensis, B. luteolus, B. luteus, B. macauensis, B. macerans, B. macquariensis, B. macyae, B. malacitensis, B. mannanilyticus, B. marisflavi, B. marismortui, B. marmarensis, B. massiliensis, B. megaterium, B. mesonae, B. methanolicus, B. methylotrophicus, B. migulanus, B. mojavensis, B. mucilaginosus, B. muralis, B. murimartini, B. mycoides, B. naganoensis, B. nanhaiensis, B. nanhaiisediminis, B. nealsonii, B. neidei, B. neizhouensis, B. niabensis, B. niacini, B. novalis, B. oceanisediminis, B. odysseyi, B. okhensis, B. okuhidensis, B. oleronius, B. oryzaecorticis, B. oshimensis, B. pabuli, B. pakistanensis, B. pallidus, B. pallidus, B. panacisoli, B. panaciterrae, B. pantothenticus, B. parabrevis, B. paraflexus, B. pasteurii, B. patagoniensis, B. peoriae, B. persepolensis, B. persicus, B. pervagus, B. plakortidis, B. pocheonensis, B. polygoni, B. polymyxa, B. popilliae, B. pseudalcalophilus, B. pseudofirmus, B. pseudomycoides, B. psychrodurans, B. psychrophilus, B. psychrosaccharolyticus, B. psychrotolerans, B. pulvifaciens, B. pumilus, B. purgationiresistens, B. pycnus, B. qingdaonensis, B. qingshengii, B. reuszeri, B. rhizosphaerae, B. rigui, B. runs, B. safensis, B. salarius, B. salexigens, B. saliphilus, B. schlegelii, B. sediminis, B. selenatarsenatis, B. selenitireducens, B. seohaeanensis, B. shacheensis, B. shackletonii, B. siamensis, B. silvestris, B. simplex, B. siralis, B. smithii, B. soli, B. solimangrovi, B. solisalsi, B. songklensis, B. sonorensis, B. sphaericus, B. sporothermodurans, B. stearothermophilus, B. stratosphericus, B. subterraneus, B. subtilis, B. taeanensis, B. tequilensis, B. thermantarcticus, B. thermoaerophilus, B. the rmoamylovorans, B. thermocatenulatus, B. thermocloacae, B. thermocopriae, B. the rmodenitrificans, B. thermoglucosidasius, B. thermolactis, B. thermoleovorans, B. thermophilus, B. thermoruber, B. thermosphaericus, B. thiaminolyticus, B. thioparans, B. thuringiensis, B. tianshenii, B. trypoxylicola, B. tusciae, B. validus, B. vallismortis, B. vedderi, B. velezensis, B. vietnamensis, B. vireti, B. vulcani, B. wakoensis, B. weihenstephanensis, B. xiamenensis, B. xiaoxiensis, and B. zhanjiangensis. In some embodiments, the Bacillus cell is Bacillus subtilis, Bacillus megaterium, Bacillus anthracis, or Bacillus brevis.

[0059] In some embodiments, the Bacillus subtilis, Bacillus megaterium, and Bacillus anthracis, and Bacillus brevis.

[0060] In some embodiments, the Bacillus cell is a wild-type cell (i.e., unmodified genetically). In some embodiments, the Bacillus cell is engineered to be protease deficient (e.g., by inactivating one or more genes encoding proteases in the Bacillus cell). Protease deficient Bacillus have been described for expressing recombinant proteins, e.g., in Fahnestock et al., Appl Environ Microbiol. 1987 February; 53(2): 379-384, incorporated herein by reference.

TABLE 1
Exemplary, non-limiting BoNT amino acid sequences

| SEQ | | |
|---|---|---|
| ID | | |
| NO | Description | Sequence |
| 1 | Wild-type | MPVTINNFNYNDPIDNNNIIMMEPPFARGTGRYYKAFKITDRIWIIPERYTFGYKPE |
| | BoNT/B1, | DFNKSSGIFNRDVCEYYDPDYLNTNDKKNIFLQTMIKLFNRIKSKPLGEKLLEMII |
| | Okra strain | NGIPYLGDRRVPLEEFNTNIASVTVNKLISNPGEVERKKGIFANLIIFGPGPVLNEN |
| | | ETIDIGIQNHFASREGFGGIMQMKFCPEYVSVFNNVQENKGASIFNRRGYFSDPAL |
| | | ILMHELIHVLHGLYGIKVDDLPIVPNEKKFFMQSTDAIQAEELYTFGGQDPSIITPS |
| | | TDKSIYDKVLQNFRGIVDRLNKVLVCISDPNININIYKNKFKDKYKFVEDSEGKYS |
| | | IDVESFDKLYKSLMFGFTETNIAENYKIKTRASYFSDSLPPVKIKNLLDNEIYTIEEG |
| | | FNISDKDMEKEYRGQNKAINKQAYEEISKEHLAVYKIQMCKSVKAPGICIDVDNE |
| | | DLFFIADKNSFSDDLSKNERIEYNTQSNYIENDFPINELILDTDLISKIELPSENTESL |
| | | TDFNVDVPVYEKQPAIKKIFTDENTIFQYLYSQTFPLDIRDISLTSSFDDALLFSNK |
| | | VYSFFSMDYIKTANKVVEAGLFAGWVKQIVNDFVIEANKSNTMDKIADISLIVPYI |
| | | GLALNVGNETAKGNFENAFEIAGASILLEFIPELLIPVVGAFLLESYIDNKNKIIKTI |
| | | DNALTKRNEKWSDMYGLIVAQWLSTVNTQFYTIKEGMYKALNYQAQALEEIIK |
| | | YRYNIYSEKEKSNINIDFNDINSKLNEGINQAIDNINNFINGCSVSYLMKKMIPLAV |
| | | EKLLDFDNTLKKNLLNYIDENKLYLIGSAEYEKSKVNKYLKTIMPFDLSIYTNDTI |
| | | LIEMFNKYNSEILNNIILNLRYKDNNLIDLSGYGAKVEVYDGVELNDKNQFKLTSS |
| | | ANSKIRVTQNQNIIFNSVFLDFSVSFWIRIPKYKNDGIQNYIHNEYTIINCMKNNSG |
| | | WKISIRGNRIIWTLIDINGKTKSVFFEYNIREDISEYINRWFFVTITNNLNNAKIYIN |
| | | GKLESNTDIKDIREVIANGEIIFKLDGDIDRTQFIWMKYFSIFNTELSQSNIEERYKI |
| | | QSYSEYLKDFWGNPLMYNKEYYMFNAGNKNSYIKLKKDSPVGEILTRSKYNQNS |
| | | KYINYRDLYIGEKFIIRRKSNSQSINDDIVRKEDYIYLDFFNLNQEWRVYTYKYFK |
| | | KEEEKLFLAPISDSDEFYNTIQIKEYDEQPTYSCQLLFKKDEESTDEIGLIGIHRFYE |
| | | SGIVFEEYKDYFCISKWYLKEVKRKPYNLKLGCNWQFIPKDEGWTE |
| 2 | Wild-type | MPVTINNFNYNDPIDNNNIIMMEPPFARGTGRYYKAFKITDRIWIIPERYTFGYKPE |
| | BoNT/B2, | DFNKSSGIFNRDVCEYYDPDYLNTNDKKNIFLQTMIKLFNRIKSKPLGEKLLEMII |
| | 111 strain | NGIPYLGDRRVPLEEFNTNIASVTVNKLISNPGEVERKKGIFANLIIFGPGPVLNEN |
| | | ETIDIGIQNHFASREGFGGIMQMKFCPEYVSVFNNVQENKGASIFNRRGYFSDPAL |
| | | ILMHELIHVLHGLYGIKVDDLPIVPNEKKFFMQSTDAIQAEELYTFGGQDPSIITPS |
| | | TDKSIYDKVLQNFRGIVDRLNKVLVCISDPNININIYKNKFKDKYKFVEDSEGKYS |
| | | IDVESFDKLYKSLMFGFTETNIAENYKIKTRASYFSDSLPPVKIKNLLDNEIYTIEEG |
| | | FNISDKNMEKEYRGQNKAINKQAYEEISKEHLAVYKIQMCKSVRAPGICIDVDNE |
| | | DLFFIADKNSFSDDLSKNERIEYDTQSNYIENRSSIDELILDTNLISKIELPSENTESL |
| | | TDFNVDVPVYEKQPAIKKIFTDENTIFQYLYSQTFPLDIRDISLTSSFDDALLFSNK |
| | | VYSFFSMDYIKTANKVVEAGLFAGWVKQIVDDFVIEANKSSTMDKIADISLIVPYI |
| | | GLALNVGNETAKGNFENAFEIAGASILLEFIPELLIPVVGAFLLESYIDNKNKIIKTI |
| | | DNALTKRDEKWIDMYGLIVAQWLSTVNTQFYTIKEGMYKALNYQAQALEEIIKY |
| | | KYNIYSEKEKSNINIDFNDINSKLNEGINQAVDNINNFINECSVSYLMKKMIPLAVE |
| | | KLLDFDNTLKKNLLNYIDENKLYLIGSAEYEKSKVDKHLKTIIPFDLSMYTNNTILI |
| | | EIFNKYNSEILNNIILNLRYRDNNLIDLSGYGANVEVYDGVELNDKNQFKLTSSTN |
| | | SEIRVTQNQNIIFNSMFLDFSVSFWIRIPKYKNDGIQNYIHNEYTIINCIKNNSGWKI |
| | | SIRGNRIIWTLTDINGKTKSVFFEYSIREDISDYINRWFFVTITNNSDNAKIYINGKL |
| | | ESNIDIKDIGEVIANGEIIFKLDGDIDRTQFIWMKYFSIFNTELSQSNIKEIYKIQSYS |
| | | EYLKDFWGNPLMYNKEYYMFNAGNKNSYIKLKKDSSVGEILTRSKYNQNSNYIN |
| | | YRNLYIGEKFIIRRKSNSQSINDDIVRKEDYIYLDFFNSNREWRVYAYKDFKEEEK |
| | | KLFLANIYDSNEFYKTIQIKEYDEQPTYSCQLLFKKDEESTDEIGLIGIHRFYESGIV |
| | | LKDYKNYFCISKWYLKEVKRKPYNPNLGCNWQFIPKDEGWIE |
| 3 | Wild-type | MPVTINNFNYNDPIDNDNIIMMEPPFARGTGRYYKAFKITDRIWIIPERYTFGYKPE |
| | BoNT/B3, | DFNKSSGIFNRDVCEYYDPDYLNTNDKKNIFLQTMIKLFNRIKSKPLGEKLLEMII |
| | CDC795 | NGIPYLGDRRVPLEEFNTNIASVTVNKLISNPGEVERKKGIFANLIIFGPGPVLNEN |
| | strain | ETIDIGIQNHFASREGFGGIMQMKFCPEYVSVFNNVQENKGASIFNRRGYFSDPAL |
| | | ILMHELIHVLHGLYGIKVDDLPIVPNEKKFFMQSTDAIQAEELYTFGGQDPRIITPS |
| | | TDKSIYDKVLQNFRGIVDRLNKVLVCISDPNININIYKNKFKDKYKFVEDSEGKYS |
| | | IDVESFDKLYKSLMFGFTETNIAENYKIKTRASYFSDSLPPVKIKNLLDNEIYTIEEG |
| | | FNISDKNMEKEYRGQNKAINKQAYEEISKEHLAVYKIQMCKSVRAPGICIDVDNE |
| | | DLFFIADKNSFSDDLSKNERIEYDTQSNYIENRSSIDELILDTNLISKIELPSENTESL |
| | | TDFNVDVPVYEKQPAIKKIFTDENTIFQYLYSQTFPLDIRDISLTSSFDDALLFSNK |
| | | VYSFFSMDYIKTANKVVEAGLFAGWVKQIVDDFVIEANKSSTMDKIADISLIVPYI |
| | | GLALNVGNETAKGNFENAFEIAGASILLEFIPELLIPVVGAFLLESYIDNKNKIIKTI |
| | | DNALTKRDEKWIDMYGLIVAQWLSTVNTQFYTIKEGMYKALNYQAQALEEIIKY |
| | | KYNIYSEKEKSNINIDFNDINSKLNEGINQAIDNINNFINECSVSYLMKKMIPLAVE |
| | | KLLDFDNTLKKNLLNYIDENKLYLIGSAEYEKSKVDKHLKTIIPFDLSMYTNNTILI |
| | | EIFNKYNSEILNNIILNLRYRDNNLIDLSGYGAKVEVYNGVELNDKNQFKLTSSAN |
| | | SKIRVTQNQDIIFNSMFLDFSVSFWIRIPKYKNDGIQNYIHNEYTIINCIKNNSGWKI |
| | | SIRGNKIIWTLTDINGKTKSVFFEYSIRKDVSEYINRWFFVTITNNSDNAKIYINGKL |
| | | ESNIDIKDIGEVIANGEIIFKLDGDIDRTQFIWMKYFSIFNTELSQSNIKEIYKIQSYS |
| | | EYLKDFWGNPLMYNKEYYMFNAGNKNSYIKLKKDSSVGEILTRSKYNQNSNYIN |
| | | YRNLYIGEKFIIRRKSNSQSINDDIVRKEDYIYLDFFNLNQEWRVYAYKDFKKKEE |
| | | KLFLANIYDSNEFYNTIQIKEYDEQPTYSCQLLFKKDEESTDEIGLIGIHRFYESGIV |
| | | FKDYKDYFCISKWYLKEVKRKPYNPNLGCNWQFIPKDEGWIE |
| 4 | Wild-type | MPVTINNFNYNDPIDNDNIIMMEPPFARGTGRYYKAFKITDRIWIIPERYTFGYKPE |
| | BoNT/B4, | DFNKSSGIFNRDVCEYYDPDYLNTNDKKNIFLQTMIKLFNRIKSKPLGEKLLEMII |
| | Eklund 17B | NGIPYLGDRRVPLEEFNTNIASVTVNKLISNPGEVEQKKGIFANLIIFGPGPVLNEN |
| | strain | ETIDIGIQNHFASREGFGGIMQMKFCPEYVSVFNNVQENKGASIFNRRGYFSDPAL |
| | | ILMHELIHVLHGLYGIKVDDLPIVPNEKKFFMQSTDTIQAEELYTFGGQDPSIISPST |
| | | DKSIYDKVLQNFRGIVDRLNKVLVCISDPNININIYKNKFKDKYKFVEDSEGKYSI |
| | | DVESFNKLYKSLMFGFTEINIAENYKIKTRASYFSDSLPPVKIKNLLDNEIYTIEEGF |
| | | NISDKNMGKEYRGQNKAINKQAYEEISKEHLAVYKIQMCKSVKVPGICIDVDNE |
| | | NLFFIADKNSFSDDLSKNERVEYNTQNNYIGNDFPINELILDTDLISKIELPSENTES |
| | | LTDFNVDVPVYEKQPAIKKVFTDENTIFQYLYSQTFPLNIRDISLTSSFDDALLVSS |
| | | KVYSFFSMDYIKTANKVVEAGLFAGWVKQIVDDFVIEANKSSTMDKIADISLIVP |
| | | YIGLALNVGDETAKGNFESAFEIAGSSILLEFIPELLIPVVGVFLLESYIDNKNKIIKT |
| | | IDNALTKRVEKWIDMYGLIVAQWLSTVNTQFYTIKEGMYKALNYQAQALEEIIK |
| | | YKYNIYSEEEKSNININFNDINSKLNDGINQAMDNINDFINECSVSYLMKKMIPLA |
| | | VKKLLDFDNTLKKNLLNYIDENKLYLIGSVEDEKSKVDKYLKTIIPFDLSTYTNNE |
| | | ILIKIFNKYNSEILNNIILNLRYRDNNLIDLSGYGAKVEVYDGVKLNDKNQFKLTSS |
| | | ADSKIRVTQNQNIIFNSMFLDFSVSFWIRIPKYRNDDIQNYIHNEYTIINCMKNNSG |
| | | WKISIRGNRIIWTLIDINGKTKSVFFEYNIREDISEYINRWFFVTITNNLDNAKIYIN |
| | | GTLESNMDIKDIGEVIVNGEITFKLDGDVDRTQFIWMKYFSIFNTQLNQSNIKEIYK |
| | | IQSYSEYLKDFWGNPLMYNKEYYMFNAGNKNSYIKLVKDSSVGEILIRSKYNQN |
| | | SNYINYRNLYIGEKFIIRRKSNSQSINDDIVRKEDYIHLDFVNSNEEWRVYAYKNF |
| | | KEQEQKLFLSIIYDSNEFYKTIQIKEYDEQPTYSCQLLFKKDEESTDDIGLIGIHRFY |
| | | ESGVLRKKYKDYFCISKWYLKEVKRKPYKSNLGCNWQFIPKDEGWTE |
| 5 | Wild-type | MPVTINNFNYNDPIDNNNIIMMEPPFARGMGRYYKAFKITDRIWIIPERYTFGYKP |
| | BoNT/B5, | EDFNKSSGIFNRDVCEYYDPDYLNTNDKKNIFLQTMIKLFNRIKSKPLGEKLLEMII |
| | CDC795 | NGIPYLGDRRVPLEEFNTNIASVTVNKLISNPGEVERKKGIFANLIIFGPGPVLNEN |
| | strain | ETIDIGIQNHFASREGFGGIMQMKFCPEYVSVFNNVQENKGASIFNRRGYFSDPAL |
| | | ILMHELIHVLHGLYGIKVNDLPIVPNEKKFFMQSTDAIQAEELYTFGGQDPSIISPS |
| | | TDKSIYDKVLQNFRGIVDRLNKVLVCISDPNININIYKNKFKDKYKFVEDSEGKYS |
| | | IDVESFDKLYKSLMFGFTETNIAENYKIKTRASYFSDSLPPVKIKNLLDNEIYTIEEG |
| | | FNISDKNMEKEYRGQNKAINKQAYEEISKEHLAVYKIQMCKSVKAPGICIDVDNE |
| | | DLFFIADKNSFSDDLSKNERIAYNTQNNYIENDFSINELILDTDLISKIELPSENTESL |
| | | TDFNVYVPVYKKQPAIKKIFTDENTIFQYLYSQTFPLDIRDISLTSSFDDALLFSNK |
| | | VYSFFSMDYIKTANKVVEAGLFAGWVKQIVDDFVIEANKSSTMDKIADISLIVPYI |
| | | GLALNVGNETAKGNFENAFEIAGASILLEFIPELLIPVVGAFLLESYIDNKNKIIETI |
| | | NSALTKRDEKWIDMYGLIVAQWLSTVNTQFYTIKEGMYKALNYQAQALEEIIKY |
| | | KYNIYSEKERSNINIDFNDVNSKLNEGINQAIDNINNFINECSVSYLMKKMIPLAVE |
| | | KLLDFDNTLRKNLLNYIDENKLYLIGSAEYEKSKVDKYLKTSIPFDLSTYTNNTILI |
| | | EIFNKYNSDILNNIILNLRYRDNKLIDLSGYGAKVEVYDGVKLNDKNQFKLTSSA |
| | | NSKIRVIQNQNIIFNSMFLDFSVSFWIRIPKYKNDGIQNYIHNEYTIINCMKNNSGW |
| | | KISIRGNMIIWTLIDINGKIKSVFFEYSIKEDISEYINRWFFVTITNNSDNAKIYINGK |
| | | LESHIDIRDIREVIANDEIIFKLDGNIDRTQFIWMKYFSIFNTELSQSNIEEIYKIQSYS |
| | | EYLKDFWGNPLMYNKEYYMFNAGNKNSYIKLKKDSSVGEILTRSKYNQNSKYIN |
| | | YRDLYIGEKFIIRRKSNSQSINDDIVRKEDYIYLDFFNLNQEWRVYMYKYFKKEEE |
| | | KLFLAPISDSDEFYNTIQIKEYDEQPTYSCQLLFKKDEESTDEIGLIGIHRFYESGIVF |
| | | KEYKDYFCISKWYLKEVKRKPYNSKLGCNWQFIPKDEGWTE |
| 6 | Wild-type | MPVTINNFNYNDPIDNNNIIMMEPPFARGTGRYYKAFKITDRIWIIPERYTFGYKPE |
| | BoNT/B6, | DFNKSSGIFNRDVCEYYDPDYLNTNDKKNIFLQTMIKLFNRIKSKPLGEKLLEMII |
| | Osaka05 | NGIPYLGDRRVPLEEFNTNIASVTVNKLISNPGEVERKKGIFANLIIFGPGPVLNEN |
| | strain | ETIDIGIQNHFASREGFGGIMQMKFCPEYVSVFNNVQENKGASIFNRRGYFSDPAL |
| | | ILMHELIHVLHGLYGIKVDDLPIVPNEKKFFMQSTDAIQAEELYTFGGQDPSIITPS |
| | | TDKSIYDKVLQNFRGIVDRLNKVLVCISDPNININIYKNKFKDKYKFVEDSEGKYS |
| | | IDVESFDKLYKSLMFGFTETNIAENYKIKTRASYFSDSLPPVKIKNLLDNEIYTIEEG |
| | | FNISDKNMEKEYRGQNKAINKQAYEEISKEHLAVYKIQMCKSVRAPGICIDVDNE |
| | | DLFFIADKNSFSDDLSKNERIEYDTQSNYIENRSSIDELILDTNLISKIELPSENTESL |
| | | TDFNVDVPVYEKQPAIKKFFTDENTIFQYLYSQTFPLDIRDISLTSSFDDALLFSNK |
| | | VYSFFSMDYIKTANKVVEAGLFAGWVKQIVDDFVIEANKSNTMDKLADISLIVPY |
| | | IGLALNVGNETAKGNFENAFEIAGASILLEFIPELLIPVVGAFLLESYIDNKNKIIKTI |
| | | DNALTKRDEKWRDMYGLIVAQWLSTVNTQFYTIKEGMYKALNYQAQALEEIIK |
| | | YKYNIYSEKEKSNINIDFNDINSKLNEGINQAIDNINNFINECSVSYLMKKMIPLAV |
| | | EKLLDFDNTLKKNLLNYIDENKLYLIGSAEYEKSKVDKHLKTIIPFDLSMYTNNTI |
| | | LIEIFKKYNSEILNNIILNLRYRDNNLIDLSGYGANVEVYDGVELNDKNQFKLTSST |
| | | NSEIRVTQNQNIIFNSMFLDFSVSFWIRIPKYKNDGIQNYIHNEYTIINCIKNNSGW |
| | | KISIRGNRIIWTLTDINGKTKSVFFEYSIREDISDYINRWFFVTITNNSDNAKIYINGK |
| | | LESNIDIKDIGEVIANGEIIFKLDGDIDRTQFIWMKYFSIFNTELSQSNIKEIYKIQSY |
| | | SEYLKDFWGNPLMYNKEYYMFNAGNKNSYIKLKKDSPVGEILTRSKYNQNSNYI |
| | | NYRNLYIGEKFIIRRKSNSQSINDDIVRKEDYIYLDFFNLNQEWRVYALKNFKKKE |
| | | EKLFLAPISDSDEFYNTIQIKEYDEQPTYSCQLLFKKDEESTDEIGLIGIHRFYESGIV |
| | | FKDYKYYFCISKWYLKEVKRKPYNPNLGCNWQFIPKDEGWIE |
| 7 | Wild-type | MPVTINNFNYNDPIDNNNIIMMEPPFARGTGRYYKAFKITDRIWIIPERYTFGYKPE |
| | BoNT/B7, | DFNKSSGIFNRDVCEYYDPDYLNTNDKKNIFLQTMIKLFNRIKSKPLGEKLLEMII |
| | Bac-04- | NGIPYLGDRRVPLEEFNTNIASVTVNKLISNPGEVERKKGIFANLIIFGPGPVLNEN |
| | 07755 strain | ETIDIGIQNHFASREGFGGIMQMKFCPEYVSVFNNVQENKGASIFNRRGYFSDPAL |
| | | ILMHELIHVLHGLYGIKVDDLPIVPNEKKFFMQSTDAIQAEELYTFGGQDPSIITPS |
| | | TDKSIYDKVLQNFRGIVDRLNKVLVCISDPNININIYKNKFKDKYKFVEDSEGKYS |
| | | IDVESFDKLYKSLMFGFTETNIAENYKIKTRASYFSDSLPPVKIKNLLDNEIYTIEEG |
| | | FNISDKDMEKEYRGQNKAINKQAYEEISKEHLAVYKIQMCKSVKAPGICIDVDNE |
| | | DLFFIADKNSFSDDLSKNERIEYNTKNIYIENYFSINELILDTDLISGIELPSENTESLT |
| | | DFNVDVPVYEKQPAIKKIFTDENTIFQYLYSQTFPLDIRDISLTSSFDDALLFSNKV |
| | | YSFFSMDYIKTANKVVEAGLFAGWVKQIIDDFVIEANKSSTMDKIADISLIVPYIGL |
| | | ALNVGNETAKGNFENAFEIAGASILLEFIPELLIPVVGAFLLESYIDNKNKIIKTIDN |
| | | ALTKRVEKWIDMYGLIVAQWLSTVNTQFYTIKEGMYKALNYQAQALEEIIKYKY |
| | | NIYSEKEKLNINIDFNDINSKLNEGINQAIDNINNFINECSVSYLMKKMIPLAIEKLL |
| | | DFDNALKKNLLNYIDENKLYLIGSVEEEKSKVDKFFKTIIPFDLSMYTNNTILIEMV |
| | | NKYNSEILNNIILNLRYRDNNLIDSSGYGAKVEVYNGVELNDKNQFKLTSSANSKI |
| | | KVTQNQNITFNSMFLDFSVSFWIRIPKYKNDGIQNYIHNEYTIINCMKNNSGWKISI |
| | | RGNRIIWTLTDINGKTKSVFFEYSIREDISDYINRWFFVTITNNLDNAKIYINGKLES |
| | | NIDIRDIREVIVNGEIIFKLDGEIDRTQFIWMKYFSIFNTELSQSNVKEIYKIQSYSKY |
| | | LKDFWGNPLMYNKEYYMFNAGNKNSYIKLVKDSSVGEILTRSKYNQNSNYINYR |
| | | NLYIGEKFIIRRKSSSQSISDDIVRKEDYIYLDFFNSNREWRVYAYKNFKGQEEKLF |
| | | LANIYDSNEFYKTIQIKEYDEQPTYSCQLLFKKDEESTDEIGLIGIHNFYESGILFKD |
| | | YKDYFCISKWYLKEVKKKPYSSNLGCNWQFIPKDEGWTE |
| 8 | Wild-type | MPVTINNFNYNDPIDNNNIIMMEPPFARGTGRYYKAFKITDRIWIIPERYTFGYKPE |
| | BoNT/B8, | DFNKSSGIFNRDVCEYYDPDYLNTNDKKNIFLQTMIKLFNRIKSKPLGEKLLEMII |
| | Maehongson | NGIPYLGDRRVPLEEFNTNIASVTVNKLISNPGGEERKEGIFANLIIFGPGPVLNENE |
| | strain | TIDIGIQNHFASREGFGGIMQMKFCPEYVSVFNNVQENKGASIFNRRGYFSDPALI |
| | | LMHELIHVLHGLYGIKVDDLPIVPNGKKFFMQSTDAIQAEELYTFGGQDPSIITPST |
| | | DKSIYDKVLQNFRGIVDRLNKVLVCISDPNININIYKNKFKDKYKFVEDSEGKYSI |
| | | DVESFDKLYKSLMFGFTETNIAENYKIKTRASYFSDSLPPVKIKNLLDDEIYTIEEG |
| | | FNISDKNMGKEYRGQNKAINKQAYEEISKEHLAVYKIQMCKSVRAPGICIDVDNE |
| | | DLFFIADKNSFSDDLSKNERIEYNTQSNYIENDFSINELILDTDLISKIELPSENTESL |
| | | TDFNVDVPVYEKQPAIKKIFTDENTIFQYLYSQTFPLDIRDISLTSSFDDALLFSNK |
| | | VYSFFSMDYIKTANKVVEAGLFAGWVKQIVDDFVIEANKSNTMDKIADISLIVPYI |
| | | GLALNVGNETAKGNFENAFEIAGSSILLEFIPELLIPVVGAFLLESYIDNKNKIIKTI |
| | | DNALTKRDEKWIDMYGLIVAQWLSTVNTQFYTIKEGMYKALNYQAQALEEIIKY |
| | | KYNIYSEKEKSNISIDFNDINSKLNEGINQAIDNINDFINECSVSYLMKKMIPLAVE |
| | | KLLDFDNTLKKNLLNYIDENKLYLIGSAEYEKSKVDKHLKTIMTFDLSMYTNNTI |
| | | LIKMVNKYNSEILNNIILNLRYRDNNLIDLSGYGANVEVYDGVELNDKNQFKLTS |
| | | STNSEIRVTQNQNIIVNSMFLDFSVSFWIRIPKYKNDGIQNYIHNEYTIINCMKNNS |
| | | GWKISIRGNRIIWTLIDINGKIKSVFFEYSIRKDVSEYINRWFFVTITNNLDNAKIYI |
| | | NGKLESNMDIRDIREVIANGEIIFKLDGDIDRTQFIWMKYFSIFNTELSQSNIEEIYKI |
| | | QSYSEYLKDFWGNPLMYNKEYYMFNAGSKNSYIKLKKDSSVGEILTRSKYNQNS |
| | | QYINYRDLYIGEKFIIKRKSNSQSINDDIVRKEDYIYLDFFNLNQEWRVYAYKDFK |
| | | GQKEQKLFLANIHDSNEFYKTIQIKEYDEQPTYSCQLLFKKDEESTDEIGLIGIHRF |
| | | YESGFVFQEYKYYFCISKWYLKEVKKKPYNPDLGCNWQFIPKDEGWTE |
| 9 | Wild-type | ILNNIILNLRYKDNNLIDLSGYGAKVEVYDGVELNDKNQFKLTSSANSKIRVTQN |
| | BoNT/B1 | QNIIFNSVFLDFSVSFWIRIPKYKNDGIQNYIHNEYTIINCMKNNSGWKISIRGNRII |
| | receptor | WTLIDINGKTKSVFFEYNIREDISEYINRWFFVTITNNLNNAKIYINGKLESNTDIK |
| | binding | DIREVIANGEIIFKLDGDIDRTQFIWMKYFSIFNTELSQSNIEERYKIQSYSEYLKDF |
| | domain | WGNPLMYNKEYYMFNAGNKNSYIKLKKDSPVGEILTRSKYNQNSKYINYRDLYI |
| | (860-1291) | GEKFIIRRKSNSQSINDDIVRKEDYIYLDFFNLNQEWRVYTYKYFKKEEEKLFLAPI |
| | | SDSDEFYNTIQIKEYDEQPTYSCQLLFKKDEESTDEIGLIGIHRFYESGIVFEEYKDY |
| | | FCISKWYLKEVKRKPYNLKLGCNWQFIPKDEGWTE |
| 10 | Wild-type | ILNNIILNLRYRDNNLIDLSGYGANVEVYDGVELNDKNQFKLTSSTNSEIRVTQNQ |
| | BoNT/B2 | NIIFNSMFLDFSVSFWIRIPKYKNDGIQNYIHNEYTIINCIKNNSGWKISIRGNRIIWT |
| | receptor | LTDINGKTKSVFFEYSIREDISDYINRWFFVTITNNSDNAKIYINGKLESNIDIKDIG |
| | binding | EVIANGEIIFKLDGDIDRTQFIWMKYFSIFNTELSQSNIKEIYKIQSYSEYLKDFWGN |
| | domain | PLMYNKEYYMFNAGNKNSYIKLKKDSSVGEILTRSKYNQNSNYINYRNLYIGEKF |
| | (860-1291) | IIRRKSNSQSINDDIVRKEDYIYLDFFNSNREWRVYAYKDFKEEEKKLFLANIYDS |
| | | NEFYKTIQIKEYDEQPTYSCQLLFKKDEESTDEIGLIGIHRFYESGIVLKDYKNYFCI |
| | | SKWYLKEVKRKPYNPNLGCNWQFIPKDEGWIE |
| 11 | Wild-type | ILNNIILNLRYRDNNLIDLSGYGAKVEVYNGVELNDKNQFKLTSSANSKIRVTQN |
| | BoNT/B3 | QDIIFNSMFLDFSVSFWIRIPKYKNDGIQNYIHNEYTIINCIKNNSGWKISIRGNKII |
| | receptor | WTLTDINGKTKSVFFEYSIRKDVSEYINRWFFVTITNNSDNAKIYINGKLESNIDIK |
| | binding | DIGEVIANGEIIFKLDGDIDRTQFIWMKYFSIFNTELSQSNIKEIYKIQSYSEYLKDF |
| | domain | WGNPLMYNKEYYMFNAGNKNSYIKLKKDSSVGEILTRSKYNQNSNYINYRNLYI |
| | (860-1291) | GEKFIIRRKSNSQSINDDIVRKEDYIYLDFFNLNQEWRVYAYKDFKKKEEKLFLAN |
| | | IYDSNEFYNTIQIKEYDEQPTYSCQLLFKKDEESTDEIGLIGIHRFYESGIVFKDYKD |
| | | YFCISKWYLKEVKRKPYNPNLGCNWQFIPKDEGWIE |
| 12 | Wild-type | ILNNIILNLRYRDNNLIDLSGYGAKVEVYDGVKLNDKNQFKLTSSADSKIRVTQN |
| | BoNT/B4 | QNIIFNSMFLDFSVSFWIRIPKYRNDDIQNYIHNEYTIINCMKNNSGWKISIRGNRII |
| | receptor | WTLIDINGKTKSVFFEYNIREDISEYINRWFFVTITNNLDNAKIYINGTLESNMDIK |
| | binding | DIGEVIVNGEITFKLDGDVDRTQFIWMKYFSIFNTQLNQSNIKEIYKIQSYSEYLKD |
| | domain | FWGNPLMYNKEYYMFNAGNKNSYIKLVKDSSVGEILIRSKYNQNSNYINYRNLY |
| | (860-1291) | IGEKFIIRRKSNSQSINDDIVRKEDYIHLDFVNSNEEWRVYAYKNFKEQEQKLFLSI |
| | | IYDSNEFYKTIQIKEYDEQPTYSCQLLFKKDEESTDDIGLIGIHRFYESGVLRKKYK |
| | | DYFCISKWYLKEVKRKPYKSNLGCNWQFIPKDEGWTE |
| 13 | Wild-type | ILNNIILNLRYRDNKLIDLSGYGAKVEVYDGVKLNDKNQFKLTSSANSKIRVIQNQ |
| | BoNT/B5 | NIIFNSMFLDFSVSFWIRIPKYKNDGIQNYIHNEYTIINCMKNNSGWKISIRGNMII |
| | receptor | WTLIDINGKIKSVFFEYSIKEDISEYINRWFFVTITNNSDNAKIYINGKLESHIDIRDI |
| | binding | REVIANDEIIFKLDGNIDRTQFIWMKYFSIFNTELSQSNIEEIYKIQSYSEYLKDFWG |
| | domain | NPLMYNKEYYMFNAGNKNSYIKLKKDSSVGEILTRSKYNQNSKYINYRDLYIGE |
| | (860-1291) | KFIIRRKSNSQSINDDIVRKEDYIYLDFFNLNQEWRVYMYKYFKKEEEKLFLAPIS |
| | | DSDEFYNTIQIKEYDEQPTYSCQLLFKKDEESTDEIGLIGIHRFYESGIVFKEYKDY |
| | | FCISKWYLKEVKRKPYNSKLGCNWQFIPKDEGWTE |
| 14 | Wild-type | ILNNIILNLRYRDNNLIDLSGYGANVEVYDGVELNDKNQFKLTSSTNSEIRVTQNQ |
| | BoNT/B6 | NIIFNSMFLDFSVSFWIRIPKYKNDGIQNYIHNEYTIINCIKNNSGWKISIRGNRIIWT |
| | receptor | LTDINGKTKSVFFEYSIREDISDYINRWFFVTITNNSDNAKIYINGKLESNIDIKDIG |
| | binding | EVIANGEIIFKLDGDIDRTQFIWMKYFSIFNTELSQSNIKEIYKIQSYSEYLKDFWGN |
| | domain | PLMYNKEYYMFNAGNKNSYIKLKKDSPVGEILTRSKYNQNSNYINYRNLYIGEKF |
| | (860-1291) | IIRRKSNSQSINDDIVRKEDYIYLDFFNLNQEWRVYALKNFKKKEEKLFLAPISDSD |
| | | EFYNTIQIKEYDEQPTYSCQLLFKKDEESTDEIGLIGIHRFYESGIVFKDYKYYFCIS |
| | | KWYLKEVKRKPYNPNLGCNWQFIPKDEGWIE |
| 15 | Wild-type | ILNNIILNLRYRDNNLIDSSGYGAKVEVYNGVELNDKNQFKLTSSANSKIKVTQN |
| | BoNT/B7 | QNITFNSMFLDFSVSFWIRIPKYKNDGIQNYIHNEYTIINCMKNNSGWKISIRGNRII |
| | receptor | WTLTDINGKTKSVFFEYSIREDISDYINRWFFVTITNNLDNAKIYINGKLESNIDIRD |
| | binding | IREVIVNGEIIFKLDGEIDRTQFIWMKYFSIFNTELSQSNVKEIYKIQSYSKYLKDFW |
| | domain | GNPLMYNKEYYMFNAGNKNSYIKLVKDSSVGEILTRSKYNQNSNYINYRNLYIG |
| | (860-1291) | EKFIIRRKSSSQSISDDIVRKEDYIYLDFFNSNREWRVYAYKNFKGQEEKLFLANIY |
| | | DSNEFYKTIQIKEYDEQPTYSCQLLFKKDEESTDEIGLIGIHNFYESGILFKDYKDY |
| | | FCISKWYLKEVKKKPYSSNLGCNWQFIPKDEGWTE |
| 16 | Wild-type | ILNNIILNLRYRDNNLIDLSGYGANVEVYDGVELNDKNQFKLTSSTNSEIRVTQNQ |
| | BoNT/B8 | NIIVNSMFLDFSVSFWIRIPKYKNDGIQNYIHNEYTIINCMKNNSGWKISIRGNRIIW |
| | receptor | TLIDINGKIKSVFFEYSIRKDVSEYINRWFFVTITNNLDNAKIYINGKLESNMDIRDI |
| | binding | REVIANGEIIFKLDGDIDRTQFIWMKYFSIFNTELSQSNIEEIYKIQSYSEYLKDFWG |
| | domain | NPLMYNKEYYMFNAGSKNSYIKLKKDSSVGEILTRSKYNQNSQYINYRDLYIGEK |
| | (860-1291) | FIIKRKSNSQSINDDIVRKEDYIYLDFFNLNQEWRVYAYKDFKGQKEQKLFLANIH |
| | | DSNEFYKTIQIKEYDEQPTYSCQLLFKKDEESTDEIGLIGIHRFYESGFVFQEYKYY |
| | | FCISKWYLKEVKKKPYNPDLGCNWQFIPKDEGWTE |
| 17 | Chimeric | MPFVNKQFNYKDPVNGVDIAYIKIPNAGQMQPVKAFKIHNKIWVIPERDTFTNPE |
| | toxin | EGDLNPPPEAKQVPVSYYDSTYLSTDNEKDNYLKGVTKLFERIYSTDLGRMLLTS |
| | BoNT/A1 | IVRGIPFWGGSTIDTELKVIDTNCINVIQPDGSYRSEELNLVIIGPSADIIQFECKSFG |
| | (1-872)-B1 | HEVLNLTRNGYGSTQYIRFSPDFTFGFEESLEVDTNPLLGAGKFATDPAVTLAHEL |
| | (860-1291) | IHAGHRLYGIAINPNRVFKVNTNAYYEMSGLEVSFEELRTFGGHDAKFIDSLQEN |
| | | EFRLYYYNKFKDIASTLNKAKSIVGTTASLQYMKNVFKEKYLLSEDTSGKFSVDK |
| | | LKFDKLYKMLTEIYTEDNFVKFFKVLNRKTYLNFDKAVFKINIVPKVNYTIYDGF |
| | | NLRNTNLAANFNGQNTEINNMNFTKLKNFTGLFEFYKLLCVRGIITSKTKSLDKG |
| | | YNKALNDLCIKVNNWDLFFSPSEDNFTNDLNKGEEITSDTNIEAAEENISLDLIQQ |
| | | YYLTFNFDNEPENISIENLSSDIIGQLELMPNIERFPNGKKYELDKYTMFHYLRAQE |
| | | FEHGKSRIALTNSVNEALLNPSRVYTFFSSDYVKKVNKATEAAMFLGWVEQLVY |
| | | DFTDETSEVSTTDKIADITIIIPYIGPALNIGNMLYKDDFVGALIFSGAVILLEFIPEIA |
| | | IPVLGTFALVSYIANKVLTVQTIDNALSKRNEKWDEVYKYIVTNWLAKVNTQIDL |
| | | IRKKMKEALENQAEATKAIINYQYNQYTEEEKNNINFNIDDLSSKLNESINKAMIN |
| | | INKFLNQCSVSYLMNSMIPYGVKRLEDFDASLKDALLKYIYDNRGTLIGQVDRLK |
| | | DKVNNTLSTDIPFQLSKYVDNQRLLSTFTEYIKNILNNIILNLRYKDNNLIDLSGYG |
| | | AKVEVYDGVELNDKNQFKLTSSANSKIRVTQNQNIIFNSVFLDFSVSFWIRIPKYK |
| | | NDGIQNYIHNEYTIINCMKNNSGWKISIRGNRIIWTLIDINGKTKSVFFEYNIREDIS |
| | | EYINRWFFVTITNNLNNAKIYINGKLESNTDIKDIREVIANGEIIFKLDGDIDRTQFI |
| | | WMKYFSIFNTELSQSNIEERYKIQSYSEYLKDFWGNPLMYNKEYYMFNAGNKNS |
| | | YIKLKKDSPVGEILTRSKYNQNSKYINYRDLYIGEKFIIRRKSNSQSINDDIVRKED |
| | | YIYLDFFNLNQEWRVYTYKYFKKEEEKLFLAPISDSDEFYNTIQIKEYDEQPTYSC |
| | | QLLFKKDEESTDEIGLIGIHRFYESGIVFEEYKDYFCISKWYLKEVKRKPYNLKLG |
| | | CNWQFIPKDEGWTE |
| 18 | Chimeric | MPFVNKQFNYKDPVNGVDIAYIKIPNAGQMQPVKAFKIHNKIWVIPERDTFTNPE |
| | toxin | EGDLNPPPEAKQVPVSYYDSTYLSTDNEKDNYLKGVTKLFERIYSTDLGRMLLTS |
| | BoNT/A2 | IVRGIPFWGGSTIDTELKVIDTNCINVIQPDGSYRSEELNLVIIGPSADIIQFECKSFG |
| | (1-872)-B1 | HDVLNLTRNGYGSTQYIRFSPDFTFGFEESLEVDTNPLLGAGKFATDPAVTLAHE |
| | (860-1291) | LIHAEHRLYGIAINPNRVFKVNTNAYYEMSGLEVSFEELRTFGGHDAKFIDSLQEN |
| | | EFRLYYYNKFKDVASTLNKAKSIIGTTASLQYMKNVFKEKYLLSEDTSGKFSVDK |
| | | LKFDKLYKMLTEIYTEDNFVNFFKVINRKTYLNFDKAVFRINIVPDENYTIKDGFN |
| | | LKGANLSTNFNGQNTEINSRNFTRLKNFTGLFEFYKLLCVRGIIPFKTKSLDEGYN |
| | | KALNDLCIKVNNWDLFFSPSEDNFTNDLDKVEEITADTNIEAAEENISLDLIQQYY |
| | | LTFDFDNEPENISIENLSSDIIGQLEPMPNIERFPNGKKYELDKYTMFHYLRAQEFE |
| | | HGDSRIILTNSAEEALLKPNVAYTFFSSKYVKKINKAVEAFMFLNWAEELVYDFT |
| | | DETNEVTTMDKIADITIIVPYIGPALNIGNMLSKGEFVEAIIFTGVVAMLEFIPEYAL |
| | | PVFGTFAIVSYIANKVLTVQTINNALSKRNEKWDEVYKYTVTNWLAKVNTQIDLI |
| | | REKMKKALENQAEATKAIINYQYNQYTEEEKNNINFNIDDLSSKLNESINSAMINI |
| | | NKFLDQCSVSYLMNSMIPYAVKRLKDFDASVRDVLLKYIYDNRGTLVLQVDRLK |
| | | DEVNNTLSADIPFQLSKYVDNKKLLSTFTEYIKNILNNIILNLRYKDNNLIDLSGYG |
| | | AKVEVYDGVELNDKNQFKLTSSANSKIRVTQNQNIIFNSVFLDFSVSFWIRIPKYK |
| | | NDGIQNYIHNEYTIINCMKNNSGWKISIRGNRIIWTLIDINGKTKSVFFEYNIREDIS |
| | | EYINRWFFVTITNNLNNAKIYINGKLESNTDIKDIREVIANGEIIFKLDGDIDRTQFI |
| | | WMKYFSIFNTELSQSNIEERYKIQSYSEYLKDFWGNPLMYNKEYYMFNAGNKNS |
| | | YIKLKKDSPVGEILTRSKYNQNSKYINYRDLYIGEKFIIRRKSNSQSINDDIVRKED |
| | | YIYLDFFNLNQEWRVYTYKYFKKEEEKLFLAPISDSDEFYNTIQIKEYDEQPTYSC |
| | | QLLFKKDEESTDEIGLIGIHRFYESGIVFEEYKDYFCISKWYLKEVKRKPYNLKLG |
| | | CNWQFIPKDEGWTE |
| 19 | Chimeric | MPFVNKPFNYRDPGNGVDIAYIKIPNAGQMQPVKAFKIHEGVWVIPERDTFTNPE |
| | toxin | EGDLNPPPEAKQVPVSYYDSTYLSTDNEKDNYLKGVIKLFDRIYSTGLGRMLLSFI |
| | BoNT/A3 | VKGIPFWGGSTIDTELKVIDTNCINVIEPGGSYRSEELNLVITGPSADIIQFECKSFG |
| | (1-872)-B1 | HDVFNLTRNGYGSTQYIRFSPDFTFGFEESLEVDTNPLLGAGTFATDPAVTLAHEL |
| | (860-1291) | IHAAHRLYGIAINPNRVLKVKTNAYYEMSGLEVSFEELRTFGGNDTNFIDSLWQK |
| | | KFSRDAYDNLQNIARILNEAKTIVGTTTPLQYMKNIFIRKYFLSEDASGKISVNKA |
| | | AFKEFYRVLTRGFTELEFVNPFKVINRKTYLNFDKAVFRINIVPDENYTINEGFNLE |
| | | GANSNGQNTEINSRNFTRLKNFTGLFEFYKLLCVRGIIPFKTKSLDEGYNKALNYL |
| | | CIKVNNWDLFFSPSEDNFTNDLDKVEEITADTNIEAAEENISSDLIQQYYLTFDFDN |
| | | EPENISIENLSSDIIGQLEPMPNIERFPNGKKYELDKYTMFHYLRAQEFEHGDSRIIL |
| | | TNSAEEALLKPNVAYTFFSSKYVKKINKAVEAVIFLSWAEELVYDFTDETNEVTT |
| | | MDKIADITIIVPYIGPALNIGNMVSKGEFVEAILFTGVVALLEFIPEYSLPVFGTFAI |
| | | VSYIANKVLTVQTINNALSKRNEKWDEVYKYTVTNWLAKVNTQIDLIREKMKK |
| | | ALENQAEATRAIINYQYNQYTEEEKNNINFNIDDLSSKLNRSINRAMININKFLDQ |
| | | CSVSYLMNSMIPYAVKRLKDFDASVRDVLLKYIYDNRGTLILQVDRLKDEVNNT |
| | | LSADIPFQLSKYVNDKKLLSTFTEYIKNIVNTILNNIILNLRYKDNNLIDLSGYGAK |
| | | VEVYDGVELNDKNQFKLTSSANSKIRVTQNQNIIFNSVFLDFSVSFWIRIPKYKND |
| | | GIQNYIHNEYTIINCMKNNSGWKISIRGNRIIWTLIDINGKTKSVFFEYNIREDISEYI |
| | | NRWFFVTITNNLNNAKIYINGKLESNTDIKDIREVIANGEIIFKLDGDIDRTQFIWM |
| | | KYFSIFNTELSQSNIEERYKIQSYSEYLKDFWGNPLMYNKEYYMFNAGNKNSYIK |
| | | LKKDSPVGEILTRSKYNQNSKYINYRDLYIGEKFIIRRKSNSQSINDDIVRKEDYIY |
| | | LDFFNLNQEWRVYTYKYFKKEEEKLFLAPISDSDEFYNTIQIKEYDEQPTYSCQLL |
| | | FKKDEESTDEIGLIGIHRFYESGIVFEEYKDYFCISKWYLKEVKRKPYNLKLGCNW |
| | | QFIPKDEGWTE |
| 20 | Chimeric | MPLVNQQINYYDPVNGVDIAYIKIPNAGKMQPVKAFKIHNKVWVIPERDIFTNPE |
| | toxin | EVDLNPPPEAKQVPISYYDSAYLSTDNEKDNYLKGVIKLFERIYSTDLGRMLLISIV |
| | BoNT/A4 | RGIPFWGGGKIDTELKVIDTNCINIIQLDDSYRSEELNLAIIGPSANIIESQCSSFRDD |
| | (1-872)-B1 | VLNLTRNGYGSTQYIRFSPDFTVGFEESLEVDTNPLLGAGKFAQDPAVALAHELI |
| | (860-1291) | HAEHRLYGIAINTNRVFKVNTNAYYEMAGLEVSLEELITFGGNDAKFIDSLQKKE |
| | | FSLYYYNKFKDIASTLNKAKSIVGTTASLQYMKNVFKEKYLLSEDATGKFLVDRL |
| | | KFDELYKLLTEIYTEDNFVKFFKVLNRKTYLNFDKAVFKINIVPDVNYTIHDGFNL |
| | | RNTNLAANFNGQNIEINNKNFDKLKNFTGLFEFYKLLCVRGIITSKTKSLDEGYNK |
| | | ALNELCIKVNNWDLFFSPSEDNFTNDLDKVEEITSDTNIEAAEENISLDLIQQYYLN |
| | | FNFDNEPENTSIENLSSDIIGQLEPMPNIERFPNGKKYELNKYTMFHYLRAQEFKH |
| | | SNSRIILTNSAKEALLKPNIVYTFFSSKYIKAINKAVEAVTFVNWIENLVYDFTDET |
| | | NEVSTMDKIADITIVIPYIGPALNIGNMIYKGEFVEAIIFSGAVILLEIVPEIALPVLG |
| | | TFALVSYVSNKVLTVQTIDNALSKRNEKWDEVYKYIVTNWLAIVNTQINLIREKM |
| | | KKALENQAEATKAIINYQYNQYTEEEKNNINFNIDDLSSKLNESINSAMININKFL |
| | | DQCSVSYLMNSMIPYAVKRLKDFDASVRDVLLKYIYDNRGTLIGQVNRLKDKVN |
| | | NTLSADIPFQLSKYVDNKKLLSTFTEYIKNILNNIILNLRYKDNNLIDLSGYGAKVE |
| | | VYDGVELNDKNQFKLTSSANSKIRVTQNQNIIFNSVFLDFSVSFWIRIPKYKNDGI |
| | | QNYIHNEYTIINCMKNNSGWKISIRGNRIIWTLIDINGKTKSVFFEYNIREDISEYIN |
| | | RWFFVTITNNLNNAKIYINGKLESNTDIKDIREVIANGEIIFKLDGDIDRTQFIWMK |
| | | YFSIFNTELSQSNIEERYKIQSYSEYLKDFWGNPLMYNKEYYMFNAGNKNSYIKL |
| | | KKDSPVGEILTRSKYNQNSKYINYRDLYIGEKFIIRRKSNSQSINDDIVRKEDYIYL |
| | | DFFNLNQEWRVYTYKYFKKEEEKLFLAPISDSDEFYNTIQIKEYDEQPTYSCQLLF |
| | | KKDEESTDEIGLIGIHRFYESGIVFEEYKDYFCISKWYLKEVKRKPYNLKLGCNW |
| | | QFIPKDEGWTE |
| 21 | Chimeric | MLFVNKQFNYKDPVNGVDIAYIKIPNAGQMQPVKAFKIHNKIWVIPERDTFTNPE |
| | toxin | EGDLNPPPEAKQVPVSYYDSTYLSTDNEKDNYLKGVTKLFERIYSTELGRMLLTSI |
| | BoNT/A5 | VRGIPFWGGSTIDTELKVIDTNCINVIQPDGSYRSEELNLVIIGPSADIIQPECKSFGH |
| | (1-872)-B1 | DVLNLTRNGYGSTQYIRFSPDFTFGFEESLEVDTNPLLGAGKFATDPAVTLAHELI |
| | (860-1291) | HAGHRLYGIAINPNRVFKVNTNAYYEMSGLEVSFEELRTFGEHDAKFIDSLQENE |
| | | FRLYYYNKFKDIASTLNKAKSIVGTTASLQYMKNVFKEKYLLSEDTSGKFSVDKL |
| | | KFDKLYKMLTEIYTEDNFVKFFKVLNRKTYLNFDKAVFKINIVPEVNYTIYDGFN |
| | | LRNTNLAANFNGQNTEINNMNFTKLKNFTGLFEFYKLLCVRGIITSKTKSLDEGY |
| | | NKALNDLCIKVNNWDLFFSPSEDNFTNDLNKGEEITSDTNIEAAEENISLDLIQQY |
| | | YLTFNFDNEPENISIENLSSDIIGQLELMPNIERFPNGKKYELDKYTMFHYLRAQEF |
| | | EHGKSRIVLTNSVNEALLNPSSVYTFFSSDYVRKVNKATEAAMFLGWVEQLVYD |
| | | FTDETSEVSTTDKIADITIIIPYIGPALNIGNMLYKDDFVGALIFSGAVILLEFIPEIAIP |
| | | VLGTFALVSYIANKVLTVQTIDNALSKRNEKWGEVYKYIVTNWLAKVNTQIDLIR |
| | | KKMKEALENQAEATKAIINYQYNQYTEEEKNNINFNIGDLSSKLNDSINKAMININ |
| | | KFLNQCSVSYLMNSMIPYGVKRLEDFDASLKDALLKYIYDNRGTLIGQVDRLKD |
| | | KVNNTLSTDIPFQLSKYVDNQRLLSTFTEYIKNILNNIILNLRYKDNNLIDLSGYGA |
| | | KVEVYDGVELNDKNQFKLTSSANSKIRVTQNQNIIFNSVFLDFSVSFWIRIPKYKN |
| | | DGIQNYIHNEYTIINCMKNNSGWKISIRGNRIIWTLIDINGKTKSVFFEYNIREDISE |
| | | YINRWFFVTITNNLNNAKIYINGKLESNTDIKDIREVIANGEIIFKLDGDIDRTQFIW |
| | | MKYFSIFNTELSQSNIEERYKIQSYSEYLKDFWGNPLMYNKEYYMFNAGNKNSYI |
| | | KLKKDSPVGEILTRSKYNQNSKYINYRDLYIGEKFIIRRKSNSQSINDDIVRKEDYI |
| | | YLDFFNLNQEWRVYTYKYFKKEEEKLFLAPISDSDEFYNTIQIKEYDEQPTYSCQL |
| | | LFKKDEESTDEIGLIGIHRFYESGIVFEEYKDYFCISKWYLKEVKRKPYNLKLGCN |
| | | WQFIPKDEGWTE |
| 22 | Chimeric | MPFVNKQFNYKDPVNGVDIAYIKIPNAGQMQPVKAFKIHNKIWVIPERDTFTNPE |
| | toxin | EGDLNPPPEAKQVPVSYYDSTYLSTDNEKDNYLKGVTKLFERIYSTDLGRMLLTS |
| | BoNT/A6 | IVRGIPFWGGSTIDTELKVIDTNCINVIQPDGSYRSEELNLVIIGPSADIIQFECKSFG |
| | (1-872)-B1 | HEVLNLTRNGYGSTQYIRFSPDFTFGFEESLEVDTNPLLGAGKFATDPAVTLAHEL |
| | (860-1291) | IHAGHRLYGIAINPNRVFKVNTNAYYEMSGLEVSFEELRTFGGHDAKFIDSLQEN |
| | | EFRLYYYNKFKDIASTLNKAKSIVGTTASLQYMKNVFKEKYLLSEDTSGKFSVDK |
| | | LKFDKLYKMLTEIYTEDNFVKFFKVLNRKTYLNFDKAVFKINIVPKVNYTIYDGF |
| | | NLRNTNLAANFNGQNTEINNMNFAKLKNFTGLFEFYKLLCVRGIITSKTKSLDKG |
| | | YNKALNDLCIKVNNWDLFFSPSEDNFTNDLNKGEEITSDTNIEAAEENISLDLIQQ |
| | | YYLTFNFDNEPENISIENLSSDIIGQLELMPNIERFPNGKKYELDKYTMFHYLSAQE |
| | | FEHGKSRIDLTNSVNEALLNPSHVYTFFSSDYVKKVNKATEAAMFLGWVEQLVY |
| | | DFTDETSEVSTTDKIADITIIIPYIGPALNIGNMLYKDDFVGALIFSGAVILLEFIPEIA |
| | | IPVLGTFAIVSYIANKVLTVQTINNALSKRNEKWDEVYKYTVTNWLAKVNTQIDL |
| | | IREKMKKALENQAEATKAIINYQYNQYTEEEKNNINFNIDDLSSKLNESINSAMINI |
| | | NKFLDQCSVSYLMNSMIPYAVKRLKDFDASVRDVLLKYIYDNRGTLIGQVDRLK |
| | | DKVNNTLSTDIPFQLSKYVDNQRLLSTFTEYIKNILNNIILNLRYKDNNLIDLSGYG |
| | | AKVEVYDGVELNDKNQFKLTSSANSKIRVTQNQNIIFNSVFLDFSVSFWIRIPKYK |
| | | NDGIQNYIHNEYTIINCMKNNSGWKISIRGNRIIWTLIDINGKTKSVFFEYNIREDIS |
| | | EYINRWFFVTITNNLNNAKIYINGKLESNTDIKDIREVIANGEIIFKLDGDIDRTQFI |
| | | WMKYFSIFNTELSQSNIEERYKIQSYSEYLKDFWGNPLMYNKEYYMFNAGNKNS |
| | | YIKLKKDSPVGEILTRSKYNQNSKYINYRDLYIGEKFIIRRKSNSQSINDDIVRKED |
| | | YIYLDFFNLNQEWRVYTYKYFKKEEEKLFLAPISDSDEFYNTIQIKEYDEQPTYSC |
| | | QLLFKKDEESTDEIGLIGIHRFYESGIVFEEYKDYFCISKWYLKEVKRKPYNLKLG |
| | | CNWQFIPKDEGWTE |
| 23 | Chimeric | MPFVNKQFNYKDPVNGVDIAYIKIPNAGQMQPVKAFKIHNKIWVIPERDIFTNPEE |
| | toxin | GDLNPPPEAKQVPVSYYDSTYLSTDNEKDNYLKGVTKLFERIYSTDLGRMLLTSI |
| | BoNT/A7 | VRGIPFWGGSTIDTELKVIDTNCINVIQPDGSYRSEELNLVIIGPSADIINFECKSFGH |
| | (1-872)-B1 | DVLNLTRNGYGSTQYIRFSPDFTFGFEESLEVDTNPLLGAGKFAIDPAVTLAHELI |
| | (860-1291) | HAGHRLYGIAINPNRVFKVNTNAYYEMSGLEVSFEELRTFGGHDAKFIDSLQENE |
| | | FRLYYYNKFKEVASILNKAKSIIGTTASLQYMKNVFKEKYLLSEDTSGKFSVDKL |
| | | RFDKLYKMLTEIYTEDNFVKFFKVLNRKTYLNFDKAVFKMNIVPEVNYTIYDGF |
| | | NLRNTNLAANFNGQNTEINNMNFTKLKNFTGLFEFYKLLCVRGIITSKTKSLDEG |
| | | YNKALNDLCIKVNNWDLFFSPSEDNFTNDLNKGEEITSDTNIEAAEENISSDLIQQ |
| | | YYLTFNFDNEPENISIENLSSDIIGQLELMPNIERFPNGKKYELDKYTMFHYLRAQE |
| | | FEYGNSRIVLINSVNEALLNPSSVYTFFSSDYVKKANEATEAAMFLGWVEQLVYD |
| | | FTDETSEVSTMDKIADITIIVPYIGPALNIGNMVYKKKFEEALIFSGAVILLEFVPEI |
| | | VLPILGTFALVSYTSNKVLTVRTIDNALSKRNEKWEEVYKYIVTNWLAKVNTQIN |
| | | LIRKKMKEALENQAEATKAIINYQYNQYTEEEKNNINFNIGDLSSKLNDSINKAMI |
| | | NINKFLDQCSVSYLMNSMIPQGVKQLKDFDTSLRDSLLKYIYDNRGTLIGQVDRL |
| | | KDKVNNTLSTDIPFQLSKYADNQRLLSTFTEYIKNILNNIILNLRYKDNNLIDLSGY |
| | | GAKVEVYDGVELNDKNQFKLTSSANSKIRVTQNQNIIFNSVFLDFSVSFWIRIPKY |
| | | KNDGIQNYIHNEYTIINCMKNNSGWKISIRGNRIIWTLIDINGKTKSVFFEYNIREDI |
| | | SEYINRWFFVTITNNLNNAKIYINGKLESNTDIKDIREVIANGEIIFKLDGDIDRTQFI |
| | | WMKYFSIFNTELSQSNIEERYKIQSYSEYLKDFWGNPLMYNKEYYMFNAGNKNS |
| | | YIKLKKDSPVGEILTRSKYNQNSKYINYRDLYIGEKFIIRRKSNSQSINDDIVRKED |
| | | YIYLDFFNLNQEWRVYTYKYFKKEEEKLFLAPISDSDEFYNTIQIKEYDEQPTYSC |
| | | QLLFKKDEESTDEIGLIGIHRFYESGIVFEEYKDYFCISKWYLKEVKRKPYNLKLG |
| | | CNWQFIPKDEGWTE |
| 24 | Chimeric | MPFVNKQFNYKDTVNGIDIAYIKIPNAGQMQPVKAFKIHNKIWVIPERDTFTNPKE |
| | toxin | GDLNPPPEAKQVPVSYYDSTYLSTDNEKDNYLKGVTKLFERIYSTDLGRMLLTSI |
| | BoNT/A8 | VRGIPFWGGSTIDTELKVIDTNCINVIQPDGSYRSEELNLVIIGPSADIIQPECKSFGH |
| | (1-872)-B1 | DVLNLTRNGYGSTQYIRFSPDFTFGFEESLEVDTNPLLGAGKFATDPAVTLAHELI |
| | (860-1292) | HAEHRLYGIAINPNRVFKVNTNAYYEMSGLEVSFEELRTFGGHNAKFIDSLQENE |
| | | FRLYYYNKFKDIASTLNKAKSIVGTTASLQYMKNVFKEKYLLSEDTSGKFSVDKL |
| | | KFDKLYKMLTEIYTEDNFVKFFKVLNRKTYLNFDKAVFKINIVPDENYTIKDGFN |
| | | LKNTNLAANFNGQNTEINSRNFTKLKNFTGLFEFYKLLCVRGIIPFKTKSLDEGYN |
| | | KALNDLCIKVNNWDLFFSPSEDNFTNDLDKVEEITSDTNIEAAEENISLDLIQQYY |
| | | LTFDFDNEPENISIENLSSDIIGQLEPMPNIERFPNGKKYELDKYTMFHYLRAQEFE |
| | | HSKSRIALTNSVNEALLNPSRVYTFFSSDYVKKVNKATEAAMFLGWVEQLVYDF |
| | | TDETSEVSTTDKIADITIIIPYIGPALNIGNMLYKDDFVGALIFSGAVILLEFIPEIAIP |
| | | VLGTFALVSYIANKVLTVQTIDNALSKRNEKWDEVYKYIVTNWLAKVNTQIDLV |
| | | RKKMKEALENQAEATKAIINYQYNQYTEEEKNNINFNIDDLSSKLNESINSAMTNI |
| | | NKFLDQCSVSYLMNSMIPYAVKRLKDFDASVREVLLKYIYDNRGTLILQVDRLK |
| | | DKVNNTLSADIPFQLSKYVDNKKLLSTFTEYIKNILNNIILNLRYKDNNLIDLSGYG |
| | | AKVEVYDGVELNDKNQFKLTSSANSKIRVTQNQNIIFNSVFLDFSVSFWIRIPKYK |
| | | NDGIQNYIHNEYTIINCMKNNSGWKISIRGNRIIWTLIDINGKTKSVFFEYNIREDIS |
| | | EYINRWFFVTITNNLNNAKIYINGKLESNTDIKDIREVIANGEIIFKLDGDIDRTQFI |
| | | WMKYFSIFNTELSQSNIEERYKIQSYSEYLKDFWGNPLMYNKEYYMFNAGNKNS |
| | | YIKLKKDSPVGEILTRSKYNQNSKYINYRDLYIGEKFIIRRKSNSQSINDDIVRKED |
| | | YIYLDFFNLNQEWRVYTYKYFKKEEEKLFLAPISDSDEFYNTIQIKEYDEQPTYSC |
| | | QLLFKKDEESTDEIGLIGIHRFYESGIVFEEYKDYFCISKWYLKEVKRKPYNLKLG |
| | | CNWQFIPKDEGWTE |
| 25 | BoNT/B1 | MPVTINNFNYNDPIDNNNIIMMEPPFARGTGRYYKAFKITDRIWIIPERYTFGYKPE |
| | I1228W/V1249W | DFNKSSGIFNRDVCEYYDPDYLNTNDKKNIFLQTMIKLFNRIKSKPLGEKLLEMII |
| | | NGIPYLGDRRVPLEEFNTNIASVTVNKLISNPGEVERKKGIFANLIIFGPGPVLNEN |
| | | ETIDIGIQNHFASREGFGGIMQMKFCPEYVSVFNNVQENKGASIFNRRGYFSDPAL |
| | | ILMHELIHVLHGLYGIKVDDLPIVPNEKKFFMQSTDAIQAEELYTFGGQDPSIITPS |
| | | TDKSIYDKVLQNFRGIVDRLNKVLVCISDPNININIYKNKFKDKYKFVEDSEGKYS |
| | | IDVESFDKLYKSLMFGFTETNIAENYKIKTRASYFSDSLPPVKIKNLLDNEIYTIEEG |
| | | FNISDKDMEKEYRGQNKAINKQAYEEISKEHLAVYKIQMCKSVKAPGICIDVDNE |
| | | DLFFIADKNSFSDDLSKNERIEYNTQSNYIENDFPINELILDTDLISKIELPSENTESL |
| | | TDFNVDVPVYEKQPAIKKIFTDENTIFQYLYSQTFPLDIRDISLTSSFDDALLFSNK |
| | | VYSFFSMDYIKTANKVVEAGLFAGWVKQIVNDFVIEANKSNTMDKIADISLIVPYI |
| | | GLALNVGNETAKGNFENAFEIAGASILLEFIPELLIPVVGAFLLESYIDNKNKIIKTI |
| | | DNALTKRNEKWSDMYGLIVAQWLSTVNTQFYTIKEGMYKALNYQAQALEEIIK |
| | | YRYNIYSEKEKSNINIDFNDINSKLNEGINQAIDNINNFINGCSVSYLMKKMIPLAV |
| | | EKLLDFDNTLKKNLLNYIDENKLYLIGSAEYEKSKVNKYLKTIMPFDLSIYTNDTI |
| | | LIEMFNKYNSEILNNIILNLRYKDNNLIDLSGYGAKVEVYDGVELNDKNQFKLTSS |
| | | ANSKIRVTQNQNIIFNSVFLDFSVSFWIRIPKYKNDGIQNYIHNEYTIINCMKNNSG |
| | | WKISIRGNRIIWTLIDINGKTKSVFFEYNIREDISEYINRWFFVTITNNLNNAKIYIN |
| | | GKLESNTDIKDIREVIANGEIIFKLDGDIDRTQFIWMKYFSIFNTELSQSNIEERYKI |
| | | QSYSEYLKDFWGNPLMYNKEYYMFNAGNKNSYIKLKKDSPVGEILTRSKYNQNS |
| | | KYINYRDLYIGEKFIIRRKSNSQSINDDIVRKEDYIYLDFFNLNQEWRVYTYKYFK |
| | | KEEEKLFLAPISDSDEFYNTIQIKEYDEQPTYSCQLLFKKDEESTDEIGLIGIHRFYE |
| | | SGWWFEEYKDYFCISKWYLKEVKRKPYNLKLGCNWQFIPKDEGWTE |
| 26 | Receptor | ILNNIILNLRYKDNNLIDLSGYGAKVEVYDGVELNDKNQFKLTSSANSKIRVTQN |
| | binding | QNIIFNSVFLDFSVSFWIRIPKYKNDGIQNYIHNEYTIINCMKNNSGWKISIRGNRII |
| | domain of | WTLIDINGKTKSVFFEYNIREDISEYINRWFFVTITNNLNNAKIYINGKLESNTDIK |
| | BoNT/B1 | DIREVIANGEIIFKLDGDIDRTQFIWMKYFSIFNTELSQSNIEERYKIQSYSEYLKDF |
| | I389W/V390W | WGNPLMYNKEYYMFNAGNKNSYIKLKKDSPVGEILTRSKYNQNSKYINYRDLYI |
| | | GEKFIIRRKSNSQSINDDIVRKEDYIYLDFFNLNQEWRVYTYKYFKKEEEKLFLAPI |
| | | SDSDEFYNTIQIKEYDEQPTYSCQLLFKKDEESTDEIGLIGIHRFYESGWWPEEYK |
| | | DYFCISKWYLKEVKRKPYNLKLGCNWQFIPKDEGWTE |
| 27 | Chimeric | MPFVNKQFNYKDPVNGVDIAYIKIPNAGQMQPVKAFKIHNKIWVIPERDTFTNPE |
| | toxin | EGDLNPPPEAKQVPVSYYDSTYLSTDNEKDNYLKGVTKLFERIYSTDLGRMLLTS |
| | BoNT/A1- | IVRGIPFWGGSTIDTELKVIDTNCINVIQPDGSYRSEELNLVIIGPSADIIQFECKSFG |
| | B1 | HEVLNLTRNGYGSTQYIRFSPDFTFGFEESLEVDTNPLLGAGKFATDPAVTLAHEL |
| | I1262W/V1 | IHAGHRLYGIAINPNRVFKVNTNAYYEMSGLEVSFEELRTFGGHDAKFIDSLQEN |
| | 262W | EFRLYYYNKFKDIASTLNKAKSIVGTTASLQYMKNVFKEKYLLSEDTSGKFSVDK |
| | | LKFDKLYKMLTEIYTEDNFVKFFKVLNRKTYLNFDKAVFKINIVPKVNYTIYDGF |
| | | NLRNTNLAANFNGQNTEINNMNFTKLKNFTGLFEFYKLLCVRGIITSKTKSLDKG |
| | | YNKALNDLCIKVNNWDLFFSPSEDNFTNDLNKGEEITSDTNIEAAEENISLDLIQQ |
| | | YYLTFNFDNEPENISIENLSSDIIGQLELMPNIERFPNGKKYELDKYTMFHYLRAQE |
| | | FEHGKSRIALTNSVNEALLNPSRVYTFFSSDYVKKVNKATEAAMFLGWVEQLVY |
| | | DFTDETSEVSTTDKIADITIIIPYIGPALNIGNMLYKDDFVGALIFSGAVILLEFIPEIA |
| | | IPVLGTFALVSYIANKVLTVQTIDNALSKRNEKWDEVYKYIVTNWLAKVNTQIDL |
| | | IRKKMKEALENQAEATKAIINYQYNQYTEEEKNNINFNIDDLSSKLNESINKAMIN |
| | | INKFLNQCSVSYLMNSMIPYGVKRLEDFDASLKDALLKYIYDNRGTLIGQVDRLK |
| | | DKVNNTLSTDIPFQLSKYVDNQRLLSTFTEYIKNILNNIILNLRYKDNNLIDLSGYG |
| | | AKVEVYDGVELNDKNQFKLTSSANSKIRVTQNQNIIFNSVFLDFSVSFWIRIPKYK |
| | | NDGIQNYIHNEYTIINCMKNNSGWKISIRGNRIIWTLIDINGKTKSVFFEYNIREDIS |
| | | EYINRWFFVTITNNLNNAKIYINGKLESNTDIKDIREVIANGEIIFKLDGDIDRTQFI |
| | | WMKYFSIFNTELSQSNIEERYKIQSYSEYLKDFWGNPLMYNKEYYMFNAGNKNS |
| | | YIKLKKDSPVGEILTRSKYNQNSKYINYRDLYIGEKFIIRRKSNSQSINDDIVRKED |
| | | YIYLDFFNLNQEWRVYTYKYFKKEEEKLFLAPISDSDEFYNTIQIKEYDEQPTYSC |
| | | QLLFKKDEESTDEIGLIGIHRFYESGWWFEEYKDYFCISKWYLKEVKRKPYNLKL |
| | | GCNWQFIPKDEGWTE |
| 28 | Chimeric | MPFVNKQFNYKDPVNGVDIAYIKIPNAGQMQPVKAFKIHNKIWVIPERDTFTNPE |
| | toxin | EGDLNPPPEAKQVPVSYYDSTYLSTDNEKDNYLKGVTKLFERIYSTDLGRMLLTS |
| | BoNT/A2- | IVRGIPFWGGSTIDTELKVIDTNCINVIQPDGSYRSEELNLVIIGPSADIIQFECKSFG |
| | B1 | HDVLNLTRNGYGSTQYIRFSPDFTFGFEESLEVDTNPLLGAGKFATDPAVTLAHE |
| | I1262W/V1 | LIHAEHRLYGIAINPNRVFKVNTNAYYEMSGLEVSFEELRTFGGHDAKFIDSLQEN |
| | 262W | EFRLYYYNKFKDVASTLNKAKSIIGTTASLQYMKNVFKEKYLLSEDTSGKFSVDK |
| | | LKFDKLYKMLTEIYTEDNFVNFFKVINRKTYLNFDKAVFRINIVPDENYTIKDGFN |
| | | LKGANLSTNFNGQNTEINSRNFTRLKNFTGLFEFYKLLCVRGIIPFKTKSLDEGYN |
| | | KALNDLCIKVNNWDLFFSPSEDNFTNDLDKVEEITADTNIEAAEENISLDLIQQYY |
| | | LTFDFDNEPENISIENLSSDIIGQLEPMPNIERFPNGKKYELDKYTMFHYLRAQEFE |
| | | HGDSRIILTNSAEEALLKPNVAYTFFSSKYVKKINKAVEAFMFLNWAEELVYDFT |
| | | DETNEVTTMDKIADITIIVPYIGPALNIGNMLSKGEFVEAIIFTGVVAMLEFIPEYAL |
| | | PVFGTFAIVSYIANKVLTVQTINNALSKRNEKWDEVYKYTVTNWLAKVNTQIDLI |
| | | REKMKKALENQAEATKAIINYQYNQYTEEEKNNINFNIDDLSSKLNESINSAMINI |
| | | NKFLDQCSVSYLMNSMIPYAVKRLKDFDASVRDVLLKYIYDNRGTLVLQVDRLK |
| | | DEVNNTLSADIPFQLSKYVDNKKLLSTFTEYIKNILNNIILNLRYKDNNLIDLSGYG |
| | | AKVEVYDGVELNDKNQFKLTSSANSKIRVTQNQNIIFNSVFLDFSVSFWIRIPKYK |
| | | NDGIQNYIHNEYTIINCMKNNSGWKISIRGNRIIWTLIDINGKTKSVFFEYNIREDIS |
| | | EYINRWFFVTITNNLNNAKIYINGKLESNTDIKDIREVIANGEIIFKLDGDIDRTQFI |
| | | WMKYFSIFNTELSQSNIEERYKIQSYSEYLKDFWGNPLMYNKEYYMFNAGNKNS |
| | | YIKLKKDSPVGEILTRSKYNQNSKYINYRDLYIGEKFIIRRKSNSQSINDDIVRKED |
| | | YIYLDFFNLNQEWRVYTYKYFKKEEEKLFLAPISDSDEFYNTIQIKEYDEQPTYSC |
| | | QLLFKKDEESTDEIGLIGIHRFYESGWWFEEYKDYFCISKWYLKEVKRKPYNLKL |
| | | GCNWQFIPKDEGWTE |
| 29 | BoNT/A1 | MPFVNKQFNYKDPVNGVDIAYIKIPNAGQMQPVKAFKIHNKIWVIPERDTFTNPE |
| | fragment (1- | EGDLNPPPEAKQVPVSYYDSTYLSTDNEKDNYLKGVTKLFERIYSTDLGRMLLTS |
| | 872) | IVRGIPFWGGSTIDTELKVIDTNCINVIQPDGSYRSEELNLVIIGPSADIIQFECKSFG |
| | | HEVLNLTRNGYGSTQYIRFSPDFTFGFEESLEVDTNPLLGAGKFATDPAVTLAHEL |
| | | IHAGHRLYGIAINPNRVFKVNTNAYYEMSGLEVSFEELRTFGGHDAKFIDSLQEN |
| | | EFRLYYYNKFKDIASTLNKAKSIVGTTASLQYMKNVFKEKYLLSEDTSGKFSVDK |
| | | LKFDKLYKMLTEIYTEDNFVKFFKVLNRKTYLNFDKAVFKINIVPKVNYTIYDGF |
| | | NLRNTNLAANFNGQNTEINNMNFTKLKNFTGLFEFYKLLCVRGIITSKTKSLDKG |
| | | YNKALNDLCIKVNNWDLFFSPSEDNFTNDLNKGEEITSDTNIEAAEENISLDLIQQ |
| | | YYLTFNFDNEPENISIENLSSDIIGQLELMPNIERFPNGKKYELDKYTMFHYLRAQE |
| | | FEHGKSRIALTNSVNEALLNPSRVYTFFSSDYVKKVNKATEAAMFLGWVEQLVY |
| | | DFTDETSEVSTTDKIADITIIIPYIGPALNIGNMLYKDDFVGALIFSGAVILLEFIPEIA |
| | | IPVLGTFALVSYIANKVLTVQTIDNALSKRNEKWDEVYKYIVTNWLAKVNTQIDL |
| | | IRKKMKEALENQAEATKAIINYQYNQYTEEEKNNINFNIDDLSSKLNESINKAMIN |
| | | INKFLNQCSVSYLMNSMIPYGVKRLEDFDASLKDALLKYIYDNRGTLIGQVDRLK |
| | | DKVNNTLSTDIPFQLSKYVDNQRLLSTFTEYIKN |
| 30 | BoNT/A2 | MPFVNKQFNYKDPVNGVDIAYIKIPNAGQMQPVKAFKIHNKIWVIPERDTFTNPE |
| | fragment (1- | EGDLNPPPEAKQVPVSYYDSTYLSTDNEKDNYLKGVTKLFERIYSTDLGRMLLTS |
| | 872) | IVRGIPFWGGSTIDTELKVIDTNCINVIQPDGSYRSEELNLVIIGPSADIIQFECKSFG |
| | | HDVLNLTRNGYGSTQYIRFSPDFTFGFEESLEVDTNPLLGAGKFATDPAVTLAHE |
| | | LIHAEHRLYGIAINPNRVFKVNTNAYYEMSGLEVSFEELRTFGGHDAKFIDSLQEN |
| | | EFRLYYYNKFKDVASTLNKAKSIIGTTASLQYMKNVFKEKYLLSEDTSGKFSVDK |
| | | LKFDKLYKMLTEIYTEDNFVNFFKVINRKTYLNFDKAVFRINIVPDENYTIKDGFN |
| | | LKGANLSTNFNGQNTEINSRNFTRLKNFTGLFEFYKLLCVRGIIPFKTKSLDEGYN |
| | | KALNDLCIKVNNWDLFFSPSEDNFTNDLDKVEEITADTNIEAAEENISLDLIQQYY |
| | | LTFDFDNEPENISIENLSSDIIGQLEPMPNIERFPNGKKYELDKYTMFHYLRAQEFE |
| | | HGDSRIILTNSAEEALLKPNVAYTFFSSKYVKKINKAVEAFMFLNWAEELVYDFT |
| | | DETNEVTTMDKIADITIIVPYIGPALNIGNMLSKGEFVEAIIFTGVVAMLEFIPEYAL |
| | | PVFGTFAIVSYIANKVLTVQTINNALSKRNEKWDEVYKYTVTNWLAKVNTQIDLI |
| | | REKMKKALENQAEATKAIINYQYNQYTEEEKNNINFNIDDLSSKLNESINSAMINI |
| | | NKFLDQCSVSYLMNSMIPYAVKRLKDFDASVRDVLLKYIYDNRGTLVLQVDRLK |
| | | DEVNNTLSADIPFQLSKYVDNKKLLSTFTEYIKN |
| 31 | BoNT/A3 | MPFVNKPFNYRDPGNGVDIAYIKIPNAGQMQPVKAFKIHEGVWVIPERDTFTNPE |
| | fragment (1- | EGDLNPPPEAKQVPVSYYDSTYLSTDNEKDNYLKGVIKLFDRIYSTGLGRMLLSFI |
| | 872) | VKGIPFWGGSTIDTELKVIDTNCINVIEPGGSYRSEELNLVITGPSADIIQFECKSFG |
| | | HDVFNLTRNGYGSTQYIRFSPDFTFGFEESLEVDTNPLLGAGTFATDPAVTLAHEL |
| | | IHAAHRLYGIAINPNRVLKVKTNAYYEMSGLEVSFEELRTFGGNDTNFIDSLWQK |
| | | KFSRDAYDNLQNIARILNEAKTIVGTTTPLQYMKNIFIRKYFLSEDASGKISVNKA |
| | | AFKEFYRVLTRGFTELEFVNPFKVINRKTYLNFDKAVFRINIVPDENYTINEGFNLE |
| | | GANSNGQNTEINSRNFTRLKNFTGLFEFYKLLCVRGIIPFKTKSLDEGYNKALNYL |
| | | CIKVNNWDLFFSPSEDNFTNDLDKVEEITADTNIEAAEENISSDLIQQYYLTFDFDN |
| | | EPENISIENLSSDIIGQLEPMPNIERFPNGKKYELDKYTMFHYLRAQEFEHGDSRIIL |
| | | TNSAEEALLKPNVAYTFFSSKYVKKINKAVEAVIFLSWAEELVYDFTDETNEVTT |
| | | MDKIADITIIVPYIGPALNIGNMVSKGEFVEAILFTGVVALLEFIPEYSLPVFGTFAI |
| | | VSYIANKVLTVQTINNALSKRNEKWDEVYKYTVTNWLAKVNTQIDLIREKMKK |
| | | ALENQAEATRAIINYQYNQYTEEEKNNINFNIDDLSSKLNRSINRAMININKFLDQ |
| | | CSVSYLMNSMIPYAVKRLKDFDASVRDVLLKYIYDNRGTLILQVDRLKDEVNNT |
| | | LSADIPFQLSKYVNDKKLLSTFTEYIKNIVNT |
| 32 | BoNT/A4 | MPLVNQQINYYDPVNGVDIAYIKIPNAGKMQPVKAFKIHNKVWVIPERDIFTNPE |
| | fragment (1- | EVDLNPPPEAKQVPISYYDSAYLSTDNEKDNYLKGVIKLFERIYSTDLGRMLLISIV |
| | 872) | RGIPFWGGGKIDTELKVIDTNCINIIQLDDSYRSEELNLAIIGPSANIIESQCSSFRDD |
| | | VLNLTRNGYGSTQYIRFSPDFTVGFEESLEVDTNPLLGAGKFAQDPAVALAHELI |
| | | HAEHRLYGIAINTNRVFKVNTNAYYEMAGLEVSLEELITFGGNDAKFIDSLQKKE |
| | | FSLYYYNKFKDIASTLNKAKSIVGTTASLQYMKNVFKEKYLLSEDATGKFLVDRL |
| | | KFDELYKLLTEIYTEDNFVKFFKVLNRKTYLNFDKAVFKINIVPDVNYTIHDGFNL |
| | | RNTNLAANFNGQNIEINNKNFDKLKNFTGLFEFYKLLCVRGIITSKTKSLDEGYNK |
| | | ALNELCIKVNNWDLFFSPSEDNFTNDLDKVEEITSDTNIEAAEENISLDLIQQYYLN |
| | | FNFDNEPENTSIENLSSDIIGQLEPMPNIERFPNGKKYELNKYTMFHYLRAQEFKH |
| | | SNSRIILTNSAKEALLKPNIVYTFFSSKYIKAINKAVEAVTFVNWIENLVYDFTDET |
| | | NEVSTMDKIADITIVIPYIGPALNIGNMIYKGEFVEAIIFSGAVILLEIVPEIALPVLG |
| | | TFALVSYVSNKVLTVQTIDNALSKRNEKWDEVYKYIVTNWLAIVNTQINLIREKM |
| | | KKALENQAEATKAIINYQYNQYTEEEKNNINFNIDDLSSKLNESINSAMININKFL |
| | | DQCSVSYLMNSMIPYAVKRLKDFDASVRDVLLKYIYDNRGTLIGQVNRLKDKVN |
| | | NTLSADIPFQLSKYVDNKKLLSTFTEYIKN |
| 33 | BoNT/A5 | MLFVNKQFNYKDPVNGVDIAYIKIPNAGQMQPVKAFKIHNKIWVIPERDTFTNPE |
| | fragment (1- | EGDLNPPPEAKQVPVSYYDSTYLSTDNEKDNYLKGVTKLFERIYSTELGRMLLTSI |
| | 872) | VRGIPFWGGSTIDTELKVIDTNCINVIQPDGSYRSEELNLVIIGPSADIIQPECKSFGH |
| | | DVLNLTRNGYGSTQYIRFSPDFTFGFEESLEVDTNPLLGA |
| | | GKFATDPAVTLAHELIHAGHRLYGIAINPNRVFKVNTNAYYEMSGLEVSFEELRT |
| | | FGEHDAKFIDSLQENEFRLYYYNKFKDIASTLNKAKSIVGTTASLQYMKNVFKEK |
| | | YLLSEDTSGKFSVDKLKFDKLYKMLTEIYTEDNFVKFFKVLNRKTYLNFDKAVF |
| | | KINIVPEVNYTIYDGFNLRNTNLAANFNGQNTEINNMNFTKLKNFTGLFEFYKLL |
| | | CVRGIITSKTKSLDEGYNKALNDLCIKVNNWDLFFSPSEDNFTNDLNKGEEITSDT |
| | | NIEAAEENISLDLIQQYYLTFNFDNEPENISIENLSSDIIGQLELMPNIERFPNGKKYE |
| | | LDKYTMFHYLRAQEFEHGKSRIVLTNSVNEALLNPSSVYTFFSSDYVRKVNKATE |
| | | AAMFLGWVEQLVYDFTDETSEVSTTDKIADITIIIPYIGPALNIGNMLYKDDFVGA |
| | | LIFSGAVILLEFIPEIAIPVLGTFALVSYIANKVLTVQTIDNALSKRNEKWGEVYKYI |
| | | VTNWLAKVNTQIDLIRKKMKEALENQAEATKAIINYQYNQYTEEEKNNINFNIGD |
| | | LSSKLNDSINKAMININKFLNQCSVSYLMNSMIPYGVKRLEDFDASLKDALLKYI |
| | | YDNRGTLIGQVDRLKDKVNNTLSTDIPFQLSKYVDNQRLLSTFTEYIKN |
| 34 | BoNT/A6 | MPFVNKQFNYKDPVNGVDIAYIKIPNAGQMQPVKAFKIHNKIWVIPERDTFTNPE |
| | fragment (1- | EGDLNPPPEAKQVPVSYYDSTYLSTDNEKDNYLKGVTKLFERIYSTDLGRMLLTS |
| | 872) | IVRGIPFWGGSTIDTELKVIDTNCINVIQPDGSYRSEELNLVIIGPSADIIQFECKSFG |
| | | HEVLNLTRNGYGSTQYIRFSPDFTFGFEESLEVDTNPLLGAGKFATDPAVTLAHEL |
| | | IHAGHRLYGIAINPNRVFKVNTNAYYEMSGLEVSFEELRTFGGHDAKFIDSLQEN |
| | | EFRLYYYNKFKDIASTLNKAKSIVGTTASLQYMKNVFKEKYLLSEDTSGKFSVDK |
| | | LKFDKLYKMLTEIYTEDNFVKFFKVLNRKTYLNFDKAVFKINIVPKVNYTIYDGF |
| | | NLRNTNLAANFNGQNTEINNMNFAKLKNFTGLFEFYKLLCVRGIITSKTKSLDKG |
| | | YNKALNDLCIKVNNWDLFFSPSEDNFTNDLNKGEEITSDTNIEAAEENISLDLIQQ |
| | | YYLTFNFDNEPENISIENLSSDIIGQLELMPNIERFPNGKKYELDKYTMFHYLSAQE |
| | | FEHGKSRIDLTNSVNEALLNPSHVYTFFSSDYVKKVNKATEAAMFLGWVEQLVY |
| | | DFTDETSEVSTTDKIADITIIIPYIGPALNIGNMLYKDDFVGALIFSGAVILLEFIPEIA |
| | | IPVLGTFAIVSYIANKVLTVQTINNALSKRNEKWDEVYKYTVTNWLAKVNTQIDL |
| | | IREKMKKALENQAEATKAIINYQYNQYTEEEKNNINFNIDDLSSKLNESINSAMINI |
| | | NKFLDQCSVSYLMNSMIPYAVKRLKDFDASVRDVLLKYIYDNRGTLIGQVDRLK |
| | | DKVNNTLSTDIPFQLSKYVDNQRLLSTFTEYIKN |
| 35 | BoNT/A7 | MPFVNKQFNYKDPVNGVDIAYIKIPNAGQMQPVKAFKIHNKIWVIPERDIFTNPEE |
| | fragment (1- | GDLNPPPEAKQVPVSYYDSTYLSTDNEKDNYLKGVTKLFERIYSTDLGRMLLTSI |
| | 872) | VRGIPFWGGSTIDTELKVIDTNCINVIQPDGSYRSEELNLVIIGPSADIINFECKSFGH |
| | | DVLNLTRNGYGSTQYIRFSPDFTFGFEESLEVDTNPLLGAGKFAIDPAVTLAHELI |
| | | HAGHRLYGIAINPNRVFKVNTNAYYEMSGLEVSFEELRTFGGHDAKFIDSLQENE |
| | | FRLYYYNKFKEVASILNKAKSIIGTTASLQYMKNVFKEKYLLSEDTSGKFSVDKL |
| | | RFDKLYKMLTEIYTEDNFVKFFKVLNRKTYLNFDKAVFKMNIVPEVNYTIYDGF |
| | | NLRNTNLAANFNGQNTEINNMNFTKLKNFTGLFEFYKLLCVRGIITSKTKSLDEG |
| | | YNKALNDLCIKVNNWDLFFSPSEDNFTNDLNKGEEITSDTNIEAAEENISSDLIQQ |
| | | YYLTFNFDNEPENISIENLSSDIIGQLELMPNIERFPNGKKYELDKYTMFHYLRAQE |
| | | FEYGNSRIVLINSVNEALLNPSSVYTFFSSDYVKKANEATEAAMFLGWVEQLVYD |
| | | FTDETSEVSTMDKIADITIIVPYIGPALNIGNMVYKKKFEEALIFSGAVILLEFVPEI |
| | | VLPILGTFALVSYTSNKVLTVRTIDNALSKRNEKWEEVYKYIVTNWLAKVNTQIN |
| | | LIRKKMKEALENQAEATKAIINYQYNQYTEEEKNNINFNIGDLSSKLNDSINKAMI |
| | | NINKFLDQCSVSYLMNSMIPQGVKQLKDFDTSLRDSLLKYIYDNRGTLIGQVDRL |
| | | KDKVNNTLSTDIPFQLSKYADNQRLLSTFTEYIKN |
| 36 | BoNT/A8 | MPFVNKQFNYKDTVNGIDIAYIKIPNAGQMQPVKAFKIHNKIWVIPERDTFTNPKE |
| | fragment (1- | GDLNPPPEAKQVPVSYYDSTYLSTDNEKDNYLKGVTKLFERIYSTDLGRMLLTSI |
| | 872) | VRGIPFWGGSTIDTELKVIDTNCINVIQPDGSYRSEELNLVIIGPSADIIQPECKSFGH |
| | | DVLNLTRNGYGSTQYIRFSPDFTFGFEESLEVDTNPLLGAGKFATDPAVTLAHELI |
| | | HAEHRLYGIAINPNRVFKVNTNAYYEMSGLEVSFEELRTFGGHNAKFIDSLQENE |
| | | FRLYYYNKFKDIASTLNKAKSIVGTTASLQYMKNVFKEKYLLSEDTSGKFSVDKL |
| | | KFDKLYKMLTEIYTEDNFVKFFKVLNRKTYLNFDKAVFKINIVPDENYTIKDGFN |
| | | LKNTNLAANFNGQNTEINSRNFTKLKNFTGLFEFYKLLCVRGIIPFKTKSLDEGYN |
| | | KALNDLCIKVNNWDLFFSPSEDNFTNDLDKVEEITSDTNIEAAEENISLDLIQQYY |
| | | LTFDFDNEPENISIENLSSDIIGQLEPMPNIERFPNGKKYELDKYTMFHYLRAQEFE |
| | | HSKSRIALTNSVNEALLNPSRVYTFFSSDYVKKVNKATEAAMFLGWVEQLVYDF |
| | | TDETSEVSTTDKIADITIIIPYIGPALNIGNMLYKDDFVGALIFSGAVILLEFIPEIAIP |
| | | VLGTFALVSYIANKVLTVQTIDNALSKRNEKWDEVYKYIVTNWLAKVNTQIDLV |
| | | RKKMKEALENQAEATKAIINYQYNQYTEEEKNNINFNIDDLSSKLNESINSAMTNI |
| | | NKFLDQCSVSYLMNSMIPYAVKRLKDFDASVREVLLKYIYDNRGTLILQVDRLK |
| | | DKVNNTLSADIPFQLSKYVDNKKLLSTFTEYIKN |
| 37 | BoNT/B1 | MPVTINNFNYNDPIDNNNIIMMEPPFARGTGRYYKAFKITDRIWIIPERYTFGYKPE |
| | E1191M/S1 | DFNKSSGIFNRDVCEYYDPDYLNTNDKKNIFLQTMIKLFNRIKSKPLGEKLLEMII |
| | 199Y/I1248 | NGIPYLGDRRVPLEEFNTNIASVTVNKLISNPGEVERKKGIFANLIIFGPGPVLNEN |
| | W/V1249W | ETIDIGIQNHFASREGFGGIMQMKFCPEYVSVFNNVQENKGASIFNRRGYFSDPAL |
| | | ILMHELIHVLHGLYGIKVDDLPIVPNEKKFFMQSTDAIQAEELYTFGGQDPSIITPS |
| | | TDKSIYDKVLQNFRGIVDRLNKVLVCISDPNININIYKNKFKDKYKFVEDSEGKYS |
| | | IDVESFDKLYKSLMFGFTETNIAENYKIKTRASYFSDSLPPVKIKNLLDNEIYTIEEG |
| | | FNISDKDMEKEYRGQNKAINKQAYEEISKEHLAVYKIQMCKSVKAPGICIDVDNE |
| | | DLFFIADKNSFSDDLSKNERIEYNTQSNYIENDFPINELILDTDLISKIELPSENTESL |
| | | TDFNVDVPVYEKQPAIKKIFTDENTIFQYLYSQTFPLDIRDISLTSSFDDALLFSNK |
| | | VYSFFSMDYIKTANKVVEAGLFAGWVKQIVNDFVIEANKSNTMDKIADISLIVPYI |
| | | GLALNVGNETAKGNFENAFEIAGASILLEFIPELLIPVVGAFLLESYIDNKNKIIKTI |
| | | DNALTKRNEKWSDMYGLIVAQWLSTVNTQFYTIKEGMYKALNYQAQALEEIIK |
| | | YRYNIYSEKEKSNINIDFNDINSKLNEGINQAIDNINNFINGCSVSYLMKKMIPLAV |
| | | EKLLDFDNTLKKNLLNYIDENKLYLIGSAEYEKSKVNKYLKTIMPFDLSIYTNDTI |
| | | LIEMFNKYNSEILNNIILNLRYKDNNLIDLSGYGAKVEVYDGVELNDKNQFKLTSS |
| | | ANSKIRVTQNQNIIFNSVFLDFSVSFWIRIPKYKNDGIQNYIHNEYTIINCMKNNSG |
| | | WKISIRGNRIIWTLIDINGKTKSVFFEYNIREDISEYINRWFFVTITNNLNNAKIYIN |
| | | GKLESNTDIKDIREVIANGEIIFKLDGDIDRTQFIWMKYFSIFNTELSQSNIEERYKI |
| | | QSYSEYLKDFWGNPLMYNKEYYMFNAGNKNSYIKLKKDSPVGEILTRSKYNQNS |
| | | KYINYRDLYIGEKFIIRRKSNSQSINDDIVRKEDYIYLDFFNLNQEWRVYTYKYFK |
| | | KEEMKLFLAPIYDSDEFYNTIQIKEYDEQPTYSCQLLFKKDEESTDEIGLIGIHRFY |
| | | ESGWWFEEYKDYFCISKWYLKEVKRKPYNLKLGCNWQFIPKDEGWTE |
| 38 | BoNT/B1 | MPVTINNFNYNDPIDNNNIIMMEPPFARGTGRYYKAFKITDRIWIIPERYTFGYKPE |
| | E1191M/S1 | DFNKSSGIFNRDVCEYYDPDYLNTNDKKNIFLQTMIKLFNRIKSKPLGEKLLEMII |
| | 199W/I1248 | NGIPYLGDRRVPLEEFNTNIASVTVNKLISNPGEVERKKGIFANLIIFGPGPVLNEN |
| | W/V1249W | ETIDIGIQNHFASREGFGGIMQMKFCPEYVSVFNNVQENKGASIFNRRGYFSDPAL |
| | | ILMHELIHVLHGLYGIKVDDLPIVPNEKKFFMQSTDAIQAEELYTFGGQDPSIITPS |
| | | TDKSIYDKVLQNFRGIVDRLNKVLVCISDPNININIYKNKFKDKYKFVEDSEGKYS |
| | | IDVESFDKLYKSLMFGFTETNIAENYKIKTRASYFSDSLPPVKIKNLLDNEIYTIEEG |
| | | FNISDKDMEKEYRGQNKAINKQAYEEISKEHLAVYKIQMCKSVKAPGICIDVDNE |
| | | DLFFIADKNSFSDDLSKNERIEYNTQSNYIENDFPINELILDTDLISKIELPSENTESL |
| | | TDFNVDVPVYEKQPAIKKIFTDENTIFQYLYSQTFPLDIRDISLTSSFDDALLFSNK |
| | | VYSFFSMDYIKTANKVVEAGLFAGWVKQIVNDFVIEANKSNTMDKIADISLIVPYI |
| | | GLALNVGNETAKGNFENAFEIAGASILLEFIPELLIPVVGAFLLESYIDNKNKIIKTI |
| | | DNALTKRNEKWSDMYGLIVAQWLSTVNTQFYTIKEGMYKALNYQAQALEEIIK |
| | | YRYNIYSEKEKSNINIDFNDINSKLNEGINQAIDNINNFINGCSVSYLMKKMIPLAV |
| | | EKLLDFDNTLKKNLLNYIDENKLYLIGSAEYEKSKVNKYLKTIMPFDLSIYTNDTI |
| | | LIEMFNKYNSEILNNIILNLRYKDNNLIDLSGYGAKVEVYDGVELNDKNQFKLTSS |
| | | ANSKIRVTQNQNIIFNSVFLDFSVSFWIRIPKYKNDGIQNYIHNEYTIINCMKNNSG |
| | | WKISIRGNRIIWTLIDINGKTKSVFFEYNIREDISEYINRWFFVTITNNLNNAKIYIN |
| | | GKLESNTDIKDIREVIANGEIIFKLDGDIDRTQFIWMKYFSIFNTELSQSNIEERYKI |
| | | QSYSEYLKDFWGNPLMYNKEYYMFNAGNKNSYIKLKKDSPVGEILTRSKYNQNS |
| | | KYINYRDLYIGEKFIIRRKSNSQSINDDIVRKEDYIYLDFFNLNQEWRVYTYKYFK |
| | | KEEMKLFLAPIWDSDEFYNTIQIKEYDEQPTYSCQLLFKKDEESTDEIGLIGIHRFY |
| | | ESGWWFEEYKDYFCISKWYLKEVKRKPYNLKLGCNWQFIPKDEGWTE |
| 39 | BoNT/B1 | MPVTINNFNYNDPIDNNNIIMMEPPFARGTGRYYKAFKITDRIWIIPERYTFGYKPE |
| | E1191M/W | DFNKSSGIFNRDVCEYYDPDYLNTNDKKNIFLQTMIKLFNRIKSKPLGEKLLEMII |
| | 1178Q/I124 | NGIPYLGDRRVPLEEFNTNIASVTVNKLISNPGEVERKKGIFANLIIFGPGPVLNEN |
| | 8W/V1249 | ETIDIGIQNHFASREGFGGIMQMKFCPEYVSVFNNVQENKGASIFNRRGYFSDPAL |
| | W | ILMHELIHVLHGLYGIKVDDLPIVPNEKKFFMQSTDAIQAEELYTFGGQDPSIITPS |
| | | TDKSIYDKVLQNFRGIVDRLNKVLVCISDPNININIYKNKFKDKYKFVEDSEGKYS |
| | | IDVESFDKLYKSLMFGFTETNIAENYKIKTRASYFSDSLPPVKIKNLLDNEIYTIEEG |
| | | FNISDKDMEKEYRGQNKAINKQAYEEISKEHLAVYKIQMCKSVKAPGICIDVDNE |
| | | DLFFIADKNSFSDDLSKNERIEYNTQSNYIENDFPINELILDTDLISKIELPSENTESL |
| | | TDFNVDVPVYEKQPAIKKIFTDENTIFQYLYSQTFPLDIRDISLTSSFDDALLFSNK |
| | | VYSFFSMDYIKTANKVVEAGLFAGWVKQIVNDFVIEANKSNTMDKIADISLIVPYI |
| | | GLALNVGNETAKGNFENAFEIAGASILLEFIPELLIPVVGAFLLESYIDNKNKIIKTI |
| | | DNALTKRNEKWSDMYGLIVAQWLSTVNTQFYTIKEGMYKALNYQAQALEEIIK |
| | | YRYNIYSEKEKSNINIDFNDINSKLNEGINQAIDNINNFINGCSVSYLMKKMIPLAV |
| | | EKLLDFDNTLKKNLLNYIDENKLYLIGSAEYEKSKVNKYLKTIMPFDLSIYTNDTI |
| | | LIEMFNKYNSEILNNIILNLRYKDNNLIDLSGYGAKVEVYDGVELNDKNQFKLTSS |
| | | ANSKIRVTQNQNIIFNSVFLDFSVSFWIRIPKYKNDGIQNYIHNEYTIINCMKNNSG |
| | | WKISIRGNRIIWTLIDINGKTKSVFFEYNIREDISEYINRWFFVTITNNLNNAKIYIN |
| | | GKLESNTDIKDIREVIANGEIIFKLDGDIDRTQFIWMKYFSIFNTELSQSNIEERYKI |
| | | QSYSEYLKDFWGNPLMYNKEYYMFNAGNKNSYIKLKKDSPVGEILTRSKYNQNS |
| | | KYINYRDLYIGEKFIIRRKSNSQSINDDIVRKEDYIYLDFFNLNQEQRVYTYKYFK |
| | | KEEMKLFLAPISDSDEFYNTIQIKEYDEQPTYSCQLLFKKDEESTDEIGLIGIHRFYE |
| | | SGWWFEEYKDYFCISKWYLKEVKRKPYNLKLGCNWQFIPKDEGWTE |
| 40 | BoNT/B1 | MPVTINNFNYNDPIDNNNIIMMEPPFARGTGRYYKAFKITDRIWIIPERYTFGYKPE |
| | E1191V/S11 | DFNKSSGIFNRDVCEYYDPDYLNTNDKKNIFLQTMIKLFNRIKSKPLGEKLLEMII |
| | 99Y/I1248 | NGIPYLGDRRVPLEEFNTNIASVTVNKLISNPGEVERKKGIFANLIIFGPGPVLNEN |
| | W/V1249W | ETIDIGIQNHFASREGFGGIMQMKFCPEYVSVFNNVQENKGASIFNRRGYFSDPAL |
| | | ILMHELIHVLHGLYGIKVDDLPIVPNEKKFFMQSTDAIQAEELYTFGGQDPSIITPS |
| | | TDKSIYDKVLQNFRGIVDRLNKVLVCISDPNININIYKNKFKDKYKFVEDSEGKYS |
| | | IDVESFDKLYKSLMFGFTETNIAENYKIKTRASYFSDSLPPVKIKNLLDNEIYTIEEG |
| | | FNISDKDMEKEYRGQNKAINKQAYEEISKEHLAVYKIQMCKSVKAPGICIDVDNE |
| | | DLFFIADKNSFSDDLSKNERIEYNTQSNYIENDFPINELILDTDLISKIELPSENTESL |
| | | TDFNVDVPVYEKQPAIKKIFTDENTIFQYLYSQTFPLDIRDISLTSSFDDALLFSNK |
| | | VYSFFSMDYIKTANKVVEAGLFAGWVKQIVNDFVIEANKSNTMDKIADISLIVPYI |
| | | GLALNVGNETAKGNFENAFEIAGASILLEFIPELLIPVVGAFLLESYIDNKNKIIKTI |
| | | DNALTKRNEKWSDMYGLIVAQWLSTVNTQFYTIKEGMYKALNYQAQALEEIIK |
| | | YRYNIYSEKEKSNINIDFNDINSKLNEGINQAIDNINNFINGCSVSYLMKKMIPLAV |
| | | EKLLDFDNTLKKNLLNYIDENKLYLIGSAEYEKSKVNKYLKTIMPFDLSIYTNDTI |
| | | LIEMFNKYNSEILNNIILNLRYKDNNLIDLSGYGAKVEVYDGVELNDKNQFKLTSS |
| | | ANSKIRVTQNQNIIFNSVFLDFSVSFWIRIPKYKNDGIQNYIHNEYTIINCMKNNSG |
| | | WKISIRGNRIIWTLIDINGKTKSVFFEYNIREDISEYINRWFFVTITNNLNNAKIYIN |
| | | GKLESNTDIKDIREVIANGEIIFKLDGDIDRTQFIWMKYFSIFNTELSQSNIEERYKI |
| | | QSYSEYLKDFWGNPLMYNKEYYMFNAGNKNSYIKLKKDSPVGEILTRSKYNQNS |
| | | KYINYRDLYIGEKFIIRRKSNSQSINDDIVRKEDYIYLDFFNLNQEWRVYTYKYFK |
| | | KEEVKLFLAPIYDSDEFYNTIQIKEYDEQPTYSCQLLFKKDEESTDEIGLIGIHRFYE |
| | | SGWWFEEYKDYFCISKWYLKEVKRKPYNLKLGCNWQFIPKDEGWTE |
| 41 | BoNT/B1 | MPVTINNFNYNDPIDNNNIIMMEPPFARGTGRYYKAFKITDRIWIIPERYTFGYKPE |
| | E1191V/S11 | DFNKSSGIFNRDVCEYYDPDYLNTNDKKNIFLQTMIKLFNRIKSKPLGEKLLEMII |
| | 99W/I1248 | NGIPYLGDRRVPLEEFNTNIASVTVNKLISNPGEVERKKGIFANLIIFGPGPVLNEN |
| | W/V1249W | ETIDIGIQNHFASREGFGGIMQMKFCPEYVSVFNNVQENKGASIFNRRGYFSDPAL |
| | | ILMHELIHVLHGLYGIKVDDLPIVPNEKKFFMQSTDAIQAEELYTFGGQDPSIITPS |
| | | TDKSIYDKVLQNFRGIVDRLNKVLVCISDPNININIYKNKFKDKYKFVEDSEGKYS |
| | | IDVESFDKLYKSLMFGFTETNIAENYKIKTRASYFSDSLPPVKIKNLLDNEIYTIEEG |
| | | FNISDKDMEKEYRGQNKAINKQAYEEISKEHLAVYKIQMCKSVKAPGICIDVDNE |
| | | DLFFIADKNSFSDDLSKNERIEYNTQSNYIENDFPINELILDTDLISKIELPSENTESL |
| | | TDFNVDVPVYEKQPAIKKIFTDENTIFQYLYSQTFPLDIRDISLTSSFDDALLFSNK |
| | | VYSFFSMDYIKTANKVVEAGLFAGWVKQIVNDFVIEANKSNTMDKIADISLIVPYI |
| | | GLALNVGNETAKGNFENAFEIAGASILLEFIPELLIPVVGAFLLESYIDNKNKIIKTI |
| | | DNALTKRNEKWSDMYGLIVAQWLSTVNTQFYTIKEGMYKALNYQAQALEEIIK |
| | | YRYNIYSEKEKSNINIDFNDINSKLNEGINQAIDNINNFINGCSVSYLMKKMIPLAV |
| | | EKLLDFDNTLKKNLLNYIDENKLYLIGSAEYEKSKVNKYLKTIMPFDLSIYTNDTI |
| | | LIEMFNKYNSEILNNIILNLRYKDNNLIDLSGYGAKVEVYDGVELNDKNQFKLTSS |
| | | ANSKIRVTQNQNIIFNSVFLDFSVSFWIRIPKYKNDGIQNYIHNEYTIINCMKNNSG |
| | | WKISIRGNRIIWTLIDINGKTKSVFFEYNIREDISEYINRWFFVTITNNLNNAKIYIN |
| | | GKLESNTDIKDIREVIANGEIIFKLDGDIDRTQFIWMKYFSIFNTELSQSNIEERYKI |
| | | QSYSEYLKDFWGNPLMYNKEYYMFNAGNKNSYIKLKKDSPVGEILTRSKYNQNS |
| | | KYINYRDLYIGEKFIIRRKSNSQSINDDIVRKEDYIYLDFFNLNQEWRVYTYKYFK |
| | | KEEVKLFLAPIWDSDEFYNTIQIKEYDEQPTYSCQLLFKKDEESTDEIGLIGIHRFY |
| | | ESGWWFEEYKDYFCISKWYLKEVKRKPYNLKLGCNWQFIPKDEGWTE |
| 42 | BoNT/B1 | MPVTINNFNYNDPIDNNNIIMMEPPFARGTGRYYKAFKITDRIWIIPERYTFGYKPE |
| | E1191V/S11 | DFNKSSGIFNRDVCEYYDPDYLNTNDKKNIFLQTMIKLFNRIKSKPLGEKLLEMII |
| | 78Q/I1248 | NGIPYLGDRRVPLEEFNTNIASVTVNKLISNPGEVERKKGIFANLIIFGPGPVLNEN |
| | W/V1249W | ETIDIGIQNHFASREGFGGIMQMKFCPEYVSVFNNVQENKGASIFNRRGYFSDPAL |
| | | ILMHELIHVLHGLYGIKVDDLPIVPNEKKFFMQSTDAIQAEELYTFGGQDPSIITPS |
| | | TDKSIYDKVLQNFRGIVDRLNKVLVCISDPNININIYKNKFKDKYKFVEDSEGKYS |
| | | IDVESFDKLYKSLMFGFTETNIAENYKIKTRASYFSDSLPPVKIKNLLDNEIYTIEEG |
| | | FNISDKDMEKEYRGQNKAINKQAYEEISKEHLAVYKIQMCKSVKAPGICIDVDNE |
| | | DLFFIADKNSFSDDLSKNERIEYNTQSNYIENDFPINELILDTDLISKIELPSENTESL |
| | | TDFNVDVPVYEKQPAIKKIFTDENTIFQYLYSQTFPLDIRDISLTSSFDDALLFSNK |
| | | VYSFFSMDYIKTANKVVEAGLFAGWVKQIVNDFVIEANKSNTMDKIADISLIVPYI |
| | | GLALNVGNETAKGNFENAFEIAGASILLEFIPELLIPVVGAFLLESYIDNKNKIIKTI |
| | | DNALTKRNEKWSDMYGLIVAQWLSTVNTQFYTIKEGMYKALNYQAQALEEIIK |
| | | YRYNIYSEKEKSNINIDFNDINSKLNEGINQAIDNINNFINGCSVSYLMKKMIPLAV |
| | | EKLLDFDNTLKKNLLNYIDENKLYLIGSAEYEKSKVNKYLKTIMPFDLSIYTNDTI |
| | | LIEMFNKYNSEILNNIILNLRYKDNNLIDLSGYGAKVEVYDGVELNDKNQFKLTSS |
| | | ANSKIRVTQNQNIIFNSVFLDFSVSFWIRIPKYKNDGIQNYIHNEYTIINCMKNNSG |
| | | WKISIRGNRIIWTLIDINGKTKSVFFEYNIREDISEYINRWFFVTITNNLNNAKIYIN |
| | | GKLESNTDIKDIREVIANGEIIFKLDGDIDRTQFIWMKYFSIFNTELSQSNIEERYKI |
| | | QSYSEYLKDFWGNPLMYNKEYYMFNAGNKNSYIKLKKDSPVGEILTRSKYNQNS |
| | | KYINYRDLYIGEKFIIRRKSNSQSINDDIVRKEDYIYLDFFNLNQEQRVYTYKYFK |
| | | KEEVKLFLAPISDSDEFYNTIQIKEYDEQPTYSCQLLFKKDEESTDEIGLIGIHRFYE |
| | | SGWWFEEYKDYFCISKWYLKEVKRKPYNLKLGCNWQFIPKDEGWTE |
| 43 | BoNT/B1 | MPVTINNFNYNDPIDNNNIIMMEPPFARGTGRYYKAFKITDRIWIIPERYTFGYKPE |
| | E1191Q/S11 | DFNKSSGIFNRDVCEYYDPDYLNTNDKKNIFLQTMIKLFNRIKSKPLGEKLLEMII |
| | 99Y/I1248 | NGIPYLGDRRVPLEEFNTNIASVTVNKLISNPGEVERKKGIFANLIIFGPGPVLNEN |
| | W/V1249W | ETIDIGIQNHFASREGFGGIMQMKFCPEYVSVFNNVQENKGASIFNRRGYFSDPAL |
| | | ILMHELIHVLHGLYGIKVDDLPIVPNEKKFFMQSTDAIQAEELYTFGGQDPSIITPS |
| | | TDKSIYDKVLQNFRGIVDRLNKVLVCISDPNININIYKNKFKDKYKFVEDSEGKYS |
| | | IDVESFDKLYKSLMFGFTETNIAENYKIKTRASYFSDSLPPVKIKNLLDNEIYTIEEG |
| | | FNISDKDMEKEYRGQNKAINKQAYEEISKEHLAVYKIQMCKSVKAPGICIDVDNE |
| | | DLFFIADKNSFSDDLSKNERIEYNTQSNYIENDFPINELILDTDLISKIELPSENTESL |
| | | TDFNVDVPVYEKQPAIKKIFTDENTIFQYLYSQTFPLDIRDISLTSSFDDALLFSNK |
| | | VYSFFSMDYIKTANKVVEAGLFAGWVKQIVNDFVIEANKSNTMDKIADISLIVPYI |
| | | GLALNVGNETAKGNFENAFEIAGASILLEFIPELLIPVVGAFLLESYIDNKNKIIKTI |
| | | DNALTKRNEKWSDMYGLIVAQWLSTVNTQFYTIKEGMYKALNYQAQALEEIIK |
| | | YRYNIYSEKEKSNINIDFNDINSKLNEGINQAIDNINNFINGCSVSYLMKKMIPLAV |
| | | EKLLDFDNTLKKNLLNYIDENKLYLIGSAEYEKSKVNKYLKTIMPFDLSIYTNDTI |
| | | LIEMFNKYNSEILNNIILNLRYKDNNLIDLSGYGAKVEVYDGVELNDKNQFKLTSS |
| | | ANSKIRVTQNQNIIFNSVFLDFSVSFWIRIPKYKNDGIQNYIHNEYTIINCMKNNSG |
| | | WKISIRGNRIIWTLIDINGKTKSVFFEYNIREDISEYINRWFFVTITNNLNNAKIYIN |
| | | GKLESNTDIKDIREVIANGEIIFKLDGDIDRTQFIWMKYFSIFNTELSQSNIEERYKI |
| | | QSYSEYLKDFWGNPLMYNKEYYMFNAGNKNSYIKLKKDSPVGEILTRSKYNQNS |
| | | KYINYRDLYIGEKFIIRRKSNSQSINDDIVRKEDYIYLDFFNLNQEWRVYTYKYFK |
| | | KEEQKLFLAPIYDSDEFYNTIQIKEYDEQPTYSCQLLFKKDEESTDEIGLIGIHRFYE |
| | | SGWWFEEYKDYFCISKWYLKEVKRKPYNLKLGCNWQFIPKDEGWTE |
| 44 | BoNT/B1 | ILNNIILNLRYKDNNLIDLSGYGAKVEVYDGVELNDKNQFKLTSSANSKIRVTQN |
| | receptor | QNIIFNSVFLDFSVSFWIRIPKYKNDGIQNYIHNEYTIINCMKNNSGWKISIRGNRII |
| | binding | WTLIDINGKTKSVFFEYNIREDISEYINRWFFVTITNNLNNAKIYINGKLESNTDIK |
| | domain | DIREVIANGEIIFKLDGDIDRTQFIWMKYFSIFNTELSQSNIEERYKIQSYSEYLKDF |
| | E332M/S34 | WGNPLMYNKEYYMFNAGNKNSYIKLKKDSPVGEILTRSKYNQNSKYINYRDLYI |
| | 0Y/I389W/ | GEKFIIRRKSNSQSINDDIVRKEDYIYLDFFNLNQEWRVYTYKYFKKEEMKLFLAP |
| | V390W | IYDSDEFYNTIQIKEYDEQPTYSCQLLFKKDEESTDEIGLIGIHRFYESGWWPEEYK |
| | | DYFCISKWYLKEVKRKPYNLKLGCNWQFIPKDEGWTE |
| 45 | BoNT/B1 | ILNNIILNLRYKDNNLIDLSGYGAKVEVYDGVELNDKNQFKLTSSANSKIRVTQN |
| | receptor | QNIIFNSVFLDFSVSFWIRIPKYKNDGIQNYIHNEYTIINCMKNNSGWKISIRGNRII |
| | binding | WTLIDINGKTKSVFFEYNIREDISEYINRWFFVTITNNLNNAKIYINGKLESNTDIK |
| | domain | DIREVIANGEIIFKLDGDIDRTQFIWMKYFSIFNTELSQSNIEERYKIQSYSEYLKDF |
| | E332M/S34 | WGNPLMYNKEYYMFNAGNKNSYIKLKKDSPVGEILTRSKYNQNSKYINYRDLYI |
| | 0W/I389W/ | GEKFIIRRKSNSQSINDDIVRKEDYIYLDFFNLNQEWRVYTYKYFKKEEMKLFLAP |
| | V390W | IWDSDEFYNTIQIKEYDEQPTYSCQLLFKKDEESTDEIGLIGIHRFYESGWWFEEY |
| | | KDYFCISKWYLKEVKRKPYNLKLGCNWQFIPKDEGWTE |
| 46 | BoNT/B1 | ILNNIILNLRYKDNNLIDLSGYGAKVEVYDGVELNDKNQFKLTSSANSKIRVTQN |
| | receptor | QNIIFNSVFLDFSVSFWIRIPKYKNDGIQNYIHNEYTIINCMKNNSGWKISIRGNRII |
| | binding | WTLIDINGKTKSVFFEYNIREDISEYINRWFFVTITNNLNNAKIYINGKLESNTDIK |
| | domain | DIREVIANGEIIFKLDGDIDRTQFIWMKYFSIFNTELSQSNIEERYKIQSYSEYLKDF |
| | E332M/W3 | WGNPLMYNKEYYMFNAGNKNSYIKLKKDSPVGEILTRSKYNQNSKYINYRDLYI |
| | 18Q/I389W/ | GEKFIIRRKSNSQSINDDIVRKEDYIYLDFFNLNQEQRVYTYKYFKKEEMKLFLAPI |
| | | SDSDEFYNTIQIKEYDEQPTYSCQLLFKKDEESTDEIGLIGIHRFYESGWWPEEYK |
| | V390W | DYFCISKWYLKEVKRKPYNLKLGCNWQFIPKDEGWTE |
| 47 | BoNT/B1 | ILNNIILNLRYKDNNLIDLSGYGAKVEVYDGVELNDKNQFKLTSSANSKIRVTQN |
| | receptor | QNIIFNSVFLDFSVSFWIRIPKYKNDGIQNYIHNEYTIINCMKNNSGWKISIRGNRII |
| | binding | WTLIDINGKTKSVFFEYNIREDISEYINRWFFVTITNNLNNAKIYINGKLESNTDIK |
| | domain | DIREVIANGEIIFKLDGDIDRTQFIWMKYFSIFNTELSQSNIEERYKIQSYSEYLKDF |
| | E332V/W31 | WGNPLMYNKEYYMFNAGNKNSYIKLKKDSPVGEILTRSKYNQNSKYINYRDLYI |
| | 8Q/I389W/ | GEKFIIRRKSNSQSINDDIVRKEDYIYLDFFNLNQEQRVYTYKYFKKEEVKLFLAPI |
| | | SDSDEFYNTIQIKEYDEQPTYSCQLLFKKDEESTDEIGLIGIHRFYESGWWPEEYK |
| | V390W | DYFCISKWYLKEVKRKPYNLKLGCNWQFIPKDEGWTE |
| 48 | BoNT/B1 | ILNNIILNLRYKDNNLIDLSGYGAKVEVYDGVELNDKNQFKLTSSANSKIRVTQN |
| | receptor | QNIIFNSVFLDFSVSFWIRIPKYKNDGIQNYIHNEYTIINCMKNNSGWKISIRGNRII |
| | binding | WTLIDINGKTKSVFFEYNIREDISEYINRWFFVTITNNLNNAKIYINGKLESNTDIK |
| | domain | DIREVIANGEIIFKLDGDIDRTQFIWMKYFSIFNTELSQSNIEERYKIQSYSEYLKDF |
| | E332V/S340 | WGNPLMYNKEYYMFNAGNKNSYIKLKKDSPVGEILTRSKYNQNSKYINYRDLYI |
| | Y/I389W/V | GEKFIIRRKSNSQSINDDIVRKEDYIYLDFFNLNQEWRVYTYKYFKKEEVKLFLAP |
| | 390W | IYDSDEFYNTIQIKEYDEQPTYSCQLLFKKDEESTDEIGLIGIHRFYESGWWPEEYK |
| | | DYFCISKWYLKEVKRKPYNLKLGCNWQFIPKDEGWTE |
| 49 | BoNT/B1 | ILNNIILNLRYKDNNLIDLSGYGAKVEVYDGVELNDKNQFKLTSSANSKIRVTQN |
| | receptor | QNIIFNSVFLDFSVSFWIRIPKYKNDGIQNYIHNEYTIINCMKNNSGWKISIRGNRII |
| | binding | WTLIDINGKTKSVFFEYNIREDISEYINRWFFVTITNNLNNAKIYINGKLESNTDIK |
| | domain | DIREVIANGEIIFKLDGDIDRTQFIWMKYFSIFNTELSQSNIEERYKIQSYSEYLKDF |
| | E332V/S340 | WGNPLMYNKEYYMFNAGNKNSYIKLKKDSPVGEILTRSKYNQNSKYINYRDLYI |
| | W/I389W/V | GEKFIIRRKSNSQSINDDIVRKEDYIYLDFFNLNQEWRVYTYKYFKKEEVKLFLAP |
| | 390W | IWDSDEFYNTIQIKEYDEQPTYSCQLLFKKDEESTDEIGLIGIHRFYESGWWFEEY |
| | | KDYFCISKWYLKEVKRKPYNLKLGCNWQFIPKDEGWTE |
| 50 | BoNT/B1 | ILNNIILNLRYKDNNLIDLSGYGAKVEVYDGVELNDKNQFKLTSSANSKIRVTQN |
| | receptor | QNIIFNSVFLDFSVSFWIRIPKYKNDGIQNYIHNEYTIINCMKNNSGWKISIRGNRII |
| | binding | WTLIDINGKTKSVFFEYNIREDISEYINRWFFVTITNNLNNAKIYINGKLESNTDIK |
| | domain | DIREVIANGEIIFKLDGDIDRTQFIWMKYFSIFNTELSQSNIEERYKIQSYSEYLKDF |
| | E332Q/S340 | WGNPLMYNKEYYMFNAGNKNSYIKLKKDSPVGEILTRSKYNQNSKYINYRDLYI |
| | Y/I389WN | GEKFIIRRKSNSQSINDDIVRKEDYIYLDFFNLNQEWRVYTYKYFKKEEQKLFLAP |
| | 390W | IYDSDEFYNTIQIKEYDEQPTYSCQLLFKKDEESTDEIGLIGIHRFYESGWWPEEYK |
| | | DYFCISKWYLKEVKRKPYNLKLGCNWQFIPKDEGWTE |
| 51 | Chimeric | MPFVNKQFNYKDPVNGVDIAYIKIPNAGQMQPVKAFKIHNKIWVIPERDTFTNPE |
| | toxin | EGDLNPPPEAKQVPVSYYDSTYLSTDNEKDNYLKGVTKLFERIYSTDLGRMLLTS |
| | BoNT/A1- | IVRGIPFWGGSTIDTELKVIDTNCINVIQPDGSYRSEELNLVIIGPSADIIQFECKSFG |
| | B1 | HEVLNLTRNGYGSTQYIRFSPDFTFGFEESLEVDTNPLLGAGKFATDPAVTLAHEL |
| | E1204M/S1 | IHAGHRLYGIAINPNRVFKVNTNAYYEMSGLEVSFEELRTFGGHDAKFIDSLQEN |
| | 212Y/I1261 | EFRLYYYNKFKDIASTLNKAKSIVGTTASLQYMKNVFKEKYLLSEDTSGKFSVDK |
| | W/V1262W | LKFDKLYKMLTEIYTEDNFVKFFKVLNRKTYLNFDKAVFKINIVPKVNYTIYDGF |
| | | NLRNTNLAANFNGQNTEINNMNFTKLKNFTGLFEFYKLLCVRGIITSKTKSLDKG |
| | | YNKALNDLCIKVNNWDLFFSPSEDNFTNDLNKGEEITSDTNIEAAEENISLDLIQQ |
| | | YYLTFNFDNEPENISIENLSSDIIGQLELMPNIERFPNGKKYELDKYTMFHYLRAQE |
| | | FEHGKSRIALTNSVNEALLNPSRVYTFFSSDYVKKVNKATEAAMFLGWVEQLVY |
| | | DFTDETSEVSTTDKIADITIIIPYIGPALNIGNMLYKDDFVGALIFSGAVILLEFIPEIA |
| | | IPVLGTFALVSYIANKVLTVQTIDNALSKRNEKWDEVYKYIVTNWLAKVNTQIDL |
| | | IRKKMKEALENQAEATKAIINYQYNQYTEEEKNNINFNIDDLSSKLNESINKAMIN |
| | | INKFLNQCSVSYLMNSMIPYGVKRLEDFDASLKDALLKYIYDNRGTLIGQVDRLK |
| | | DKVNNTLSTDIPFQLSKYVDNQRLLSTFTEYIKNILNNIILNLRYKDNNLIDLSGYG |
| | | AKVEVYDGVELNDKNQFKLTSSANSKIRVTQNQNIIFNSVFLDFSVSFWIRIPKYK |
| | | NDGIQNYIHNEYTIINCMKNNSGWKISIRGNRIIWTLIDINGKTKSVFFEYNIREDIS |
| | | EYINRWFFVTITNNLNNAKIYINGKLESNTDIKDIREVIANGEIIFKLDGDIDRTQFI |
| | | WMKYFSIFNTELSQSNIEERYKIQSYSEYLKDFWGNPLMYNKEYYMFNAGNKNS |
| | | YIKLKKDSPVGEILTRSKYNQNSKYINYRDLYIGEKFIIRRKSNSQSINDDIVRKED |
| | | YIYLDFFNLNQEWRVYTYKYFKKEEMKLFLAPIYDSDEFYNTIQIKEYDEQPTYS |
| | | CQLLFKKDEESTDEIGLIGIHRFYESGWWFEEYKDYFCISKWYLKEVKRKPYNLK |
| | | LGCNWQFIPKDEGWTE |
| 52 | Chimeric | MPFVNKQFNYKDPVNGVDIAYIKIPNAGQMQPVKAFKIHNKIWVIPERDTFTNPE |
| | toxin | EGDLNPPPEAKQVPVSYYDSTYLSTDNEKDNYLKGVTKLFERIYSTDLGRMLLTS |
| | BoNT/A1- | IVRGIPFWGGSTIDTELKVIDTNCINVIQPDGSYRSEELNLVIIGPSADIIQFECKSFG |
| | B1 | HEVLNLTRNGYGSTQYIRFSPDFTFGFEESLEVDTNPLLGAGKFATDPAVTLAHEL |
| | E1204M/S1 | IHAGHRLYGIAINPNRVFKVNTNAYYEMSGLEVSFEELRTFGGHDAKFIDSLQEN |
| | 212W/I1261 | EFRLYYYNKFKDIASTLNKAKSIVGTTASLQYMKNVFKEKYLLSEDTSGKFSVDK |
| | W/V1262W | LKFDKLYKMLTEIYTEDNFVKFFKVLNRKTYLNFDKAVFKINIVPKVNYTIYDGF |
| | | NLRNTNLAANFNGQNTEINNMNFTKLKNFTGLFEFYKLLCVRGIITSKTKSLDKG |
| | | YNKALNDLCIKVNNWDLFFSPSEDNFTNDLNKGEEITSDTNIEAAEENISLDLIQQ |
| | | YYLTFNFDNEPENISIENLSSDIIGQLELMPNIERFPNGKKYELDKYTMFHYLRAQE |
| | | FEHGKSRIALTNSVNEALLNPSRVYTFFSSDYVKKVNKATEAAMFLGWVEQLVY |
| | | DFTDETSEVSTTDKIADITIIIPYIGPALNIGNMLYKDDFVGALIFSGAVILLEFIPEIA |
| | | IPVLGTFALVSYIANKVLTVQTIDNALSKRNEKWDEVYKYIVTNWLAKVNTQIDL |
| | | IRKKMKEALENQAEATKAIINYQYNQYTEEEKNNINFNIDDLSSKLNESINKAMIN |
| | | INKFLNQCSVSYLMNSMIPYGVKRLEDFDASLKDALLKYIYDNRGTLIGQVDRLK |
| | | DKVNNTLSTDIPFQLSKYVDNQRLLSTFTEYIKNILNNIILNLRYKDNNLIDLSGYG |
| | | AKVEVYDGVELNDKNQFKLTSSANSKIRVTQNQNIIFNSVFLDFSVSFWIRIPKYK |
| | | NDGIQNYIHNEYTIINCMKNNSGWKISIRGNRIIWTLIDINGKTKSVFFEYNIREDIS |
| | | EYINRWFFVTITNNLNNAKIYINGKLESNTDIKDIREVIANGEIIFKLDGDIDRTQFI |
| | | WMKYFSIFNTELSQSNIEERYKIQSYSEYLKDFWGNPLMYNKEYYMFNAGNKNS |
| | | YIKLKKDSPVGEILTRSKYNQNSKYINYRDLYIGEKFIIRRKSNSQSINDDIVRKED |
| | | YIYLDFFNLNQEWRVYTYKYFKKEEMKLFLAPIWDSDEFYNTIQIKEYDEQPTYS |
| | | CQLLFKKDEESTDEIGLIGIHRFYESGWWFEEYKDYFCISKWYLKEVKRKPYNLK |
| | | LGCNWQFIPKDEGWTE |
| 53 | Chimeric | MPFVNKQFNYKDPVNGVDIAYIKIPNAGQMQPVKAFKIHNKIWVIPERDTFTNPE |
| | toxin | EGDLNPPPEAKQVPVSYYDSTYLSTDNEKDNYLKGVTKLFERIYSTDLGRMLLTS |
| | BoNT/A1- | IVRGIPFWGGSTIDTELKVIDTNCINVIQPDGSYRSEELNLVIIGPSADIIQFECKSFG |
| | B1 | HEVLNLTRNGYGSTQYIRFSPDFTFGFEESLEVDTNPLLGAGKFATDPAVTLAHEL |
| | E1204M/W | IHAGHRLYGIAINPNRVFKVNTNAYYEMSGLEVSFEELRTFGGHDAKFIDSLQEN |
| | 1191Q/I126 | EFRLYYYNKFKDIASTLNKAKSIVGTTASLQYMKNVFKEKYLLSEDTSGKFSVDK |
| | 1W/V1262 | LKFDKLYKMLTEIYTEDNFVKFFKVLNRKTYLNFDKAVFKINIVPKVNYTIYDGF |
| | W | NLRNTNLAANFNGQNTEINNMNFTKLKNFTGLFEFYKLLCVRGIITSKTKSLDKG |
| | | YNKALNDLCIKVNNWDLFFSPSEDNFTNDLNKGEEITSDTNIEAAEENISLDLIQQ |
| | | YYLTFNFDNEPENISIENLSSDIIGQLELMPNIERFPNGKKYELDKYTMFHYLRAQE |
| | | FEHGKSRIALTNSVNEALLNPSRVYTFFSSDYVKKVNKATEAAMFLGWVEQLVY |
| | | DFTDETSEVSTTDKIADITIIIPYIGPALNIGNMLYKDDFVGALIFSGAVILLEFIPEIA |
| | | IPVLGTFALVSYIANKVLTVQTIDNALSKRNEKWDEVYKYIVTNWLAKVNTQIDL |
| | | IRKKMKEALENQAEATKAIINYQYNQYTEEEKNNINFNIDDLSSKLNESINKAMIN |
| | | INKFLNQCSVSYLMNSMIPYGVKRLEDFDASLKDALLKYIYDNRGTLIGQVDRLK |
| | | DKVNNTLSTDIPFQLSKYVDNQRLLSTFTEYIKNILNNIILNLRYKDNNLIDLSGYG |
| | | AKVEVYDGVELNDKNQFKLTSSANSKIRVTQNQNIIFNSVFLDFSVSFWIRIPKYK |
| | | NDGIQNYIHNEYTIINCMKNNSGWKISIRGNRIIWTLIDINGKTKSVFFEYNIREDIS |
| | | EYINRWFFVTITNNLNNAKIYINGKLESNTDIKDIREVIANGEIIFKLDGDIDRTQFI |
| | | WMKYFSIFNTELSQSNIEERYKIQSYSEYLKDFWGNPLMYNKEYYMFNAGNKNS |
| | | YIKLKKDSPVGEILTRSKYNQNSKYINYRDLYIGEKFIIRRKSNSQSINDDIVRKED |
| | | YIYLDFFNLNQEQRVYTYKYFKKEEMKLFLAPISDSDEFYNTIQIKEYDEQPTYSC |
| | | QLLFKKDEESTDEIGLIGIHRFYESGWWFEEYKDYFCISKWYLKEVKRKPYNLKL |
| | | GCNWQFIPKDEGWTE |
| 54 | Chimeric | MPFVNKQFNYKDPVNGVDIAYIKIPNAGQMQPVKAFKIHNKIWVIPERDTFTNPE |
| | toxin | EGDLNPPPEAKQVPVSYYDSTYLSTDNEKDNYLKGVTKLFERIYSTDLGRMLLTS |
| | BoNT/A1- | IVRGIPFWGGSTIDTELKVIDTNCINVIQPDGSYRSEELNLVIIGPSADIIQFECKSFG |
| | B1 | HEVLNLTRNGYGSTQYIRFSPDFTFGFEESLEVDTNPLLGAGKFATDPAVTLAHEL |
| | E1204V/S12 | IHAGHRLYGIAINPNRVFKVNTNAYYEMSGLEVSFEELRTFGGHDAKFIDSLQEN |
| | 12Y/I1261 | EFRLYYYNKFKDIASTLNKAKSIVGTTASLQYMKNVFKEKYLLSEDTSGKFSVDK |
| | W/V1262W | LKFDKLYKMLTEIYTEDNFVKFFKVLNRKTYLNFDKAVFKINIVPKVNYTIYDGF |
| | | NLRNTNLAANFNGQNTEINNMNFTKLKNFTGLFEFYKLLCVRGIITSKTKSLDKG |
| | | YNKALNDLCIKVNNWDLFFSPSEDNFTNDLNKGEEITSDTNIEAAEENISLDLIQQ |
| | | YYLTFNFDNEPENISIENLSSDIIGQLELMPNIERFPNGKKYELDKYTMFHYLRAQE |
| | | FEHGKSRIALTNSVNEALLNPSRVYTFFSSDYVKKVNKATEAAMFLGWVEQLVY |
| | | DFTDETSEVSTTDKIADITIIIPYIGPALNIGNMLYKDDFVGALIFSGAVILLEFIPEIA |
| | | IPVLGTFALVSYIANKVLTVQTIDNALSKRNEKWDEVYKYIVTNWLAKVNTQIDL |
| | | IRKKMKEALENQAEATKAIINYQYNQYTEEEKNNINFNIDDLSSKLNESINKAMIN |
| | | INKFLNQCSVSYLMNSMIPYGVKRLEDFDASLKDALLKYIYDNRGTLIGQVDRLK |
| | | DKVNNTLSTDIPFQLSKYVDNQRLLSTFTEYIKNILNNIILNLRYKDNNLIDLSGYG |
| | | AKVEVYDGVELNDKNQFKLTSSANSKIRVTQNQNIIFNSVFLDFSVSFWIRIPKYK |
| | | NDGIQNYIHNEYTIINCMKNNSGWKISIRGNRIIWTLIDINGKTKSVFFEYNIREDIS |
| | | EYINRWFFVTITNNLNNAKIYINGKLESNTDIKDIREVIANGEIIFKLDGDIDRTQFI |
| | | WMKYFSIFNTELSQSNIEERYKIQSYSEYLKDFWGNPLMYNKEYYMFNAGNKNS |
| | | YIKLKKDSPVGEILTRSKYNQNSKYINYRDLYIGEKFIIRRKSNSQSINDDIVRKED |
| | | YIYLDFFNLNQEWRVYTYKYFKKEEVKLFLAPIYDSDEFYNTIQIKEYDEQPTYSC |
| | | QLLFKKDEESTDEIGLIGIHRFYESGWWFEEYKDYFCISKWYLKEVKRKPYNLKL |
| | | GCNWQFIPKDEGWTE |
| 55 | Chimeric | MPFVNKQFNYKDPVNGVDIAYIKIPNAGQMQPVKAFKIHNKIWVIPERDTFTNPE |
| | toxin | EGDLNPPPEAKQVPVSYYDSTYLSTDNEKDNYLKGVTKLFERIYSTDLGRMLLTS |
| | BoNT/A1- | IVRGIPFWGGSTIDTELKVIDTNCINVIQPDGSYRSEELNLVIIGPSADIIQFECKSFG |
| | B1 | HEVLNLTRNGYGSTQYIRFSPDFTFGFEESLEVDTNPLLGAGKFATDPAVTLAHEL |
| | E1204V/S12 | IHAGHRLYGIAINPNRVFKVNTNAYYEMSGLEVSFEELRTFGGHDAKFIDSLQEN |
| | 12W/I1262 | EFRLYYYNKFKDIASTLNKAKSIVGTTASLQYMKNVFKEKYLLSEDTSGKFSVDK |
| | W/V1262W | LKFDKLYKMLTEIYTEDNFVKFFKVLNRKTYLNFDKAVFKINIVPKVNYTIYDGF |
| | | NLRNTNLAANFNGQNTEINNMNFTKLKNFTGLFEFYKLLCVRGIITSKTKSLDKG |
| | | YNKALNDLCIKVNNWDLFFSPSEDNFTNDLNKGEEITSDTNIEAAEENISLDLIQQ |
| | | YYLTFNFDNEPENISIENLSSDIIGQLELMPNIERFPNGKKYELDKYTMFHYLRAQE |
| | | FEHGKSRIALTNSVNEALLNPSRVYTFFSSDYVKKVNKATEAAMFLGWVEQLVY |
| | | DFTDETSEVSTTDKIADITIIIPYIGPALNIGNMLYKDDFVGALIFSGAVILLEFIPEIA |
| | | IPVLGTFALVSYIANKVLTVQTIDNALSKRNEKWDEVYKYIVTNWLAKVNTQIDL |
| | | IRKKMKEALENQAEATKAIINYQYNQYTEEEKNNINFNIDDLSSKLNESINKAMIN |
| | | INKFLNQCSVSYLMNSMIPYGVKRLEDFDASLKDALLKYIYDNRGTLIGQVDRLK |
| | | DKVNNTLSTDIPFQLSKYVDNQRLLSTFTEYIKNILNNIILNLRYKDNNLIDLSGYG |
| | | AKVEVYDGVELNDKNQFKLTSSANSKIRVTQNQNIIFNSVFLDFSVSFWIRIPKYK |
| | | NDGIQNYIHNEYTIINCMKNNSGWKISIRGNRIIWTLIDINGKTKSVFFEYNIREDIS |
| | | EYINRWFFVTITNNLNNAKIYINGKLESNTDIKDIREVIANGEIIFKLDGDIDRTQFI |
| | | WMKYFSIFNTELSQSNIEERYKIQSYSEYLKDFWGNPLMYNKEYYMFNAGNKNS |
| | | YIKLKKDSPVGEILTRSKYNQNSKYINYRDLYIGEKFIIRRKSNSQSINDDIVRKED |
| | | YIYLDFFNLNQEWRVYTYKYFKKEEVKLFLAPIWDSDEFYNTIQIKEYDEQPTYS |
| | | CQLLFKKDEESTDEIGLIGIHRFYESGWWFEEYKDYFCISKWYLKEVKRKPYNLK |
| | | LGCNWQFIPKDEGWTE |
| 56 | Chimeric | MPFVNKQFNYKDPVNGVDIAYIKIPNAGQMQPVKAFKIHNKIWVIPERDTFTNPE |
| | toxin | EGDLNPPPEAKQVPVSYYDSTYLSTDNEKDNYLKGVTKLFERIYSTDLGRMLLTS |
| | BoNT/A1- | IVRGIPFWGGSTIDTELKVIDTNCINVIQPDGSYRSEELNLVIIGPSADIIQFECKSFG |
| | B1 | HEVLNLTRNGYGSTQYIRFSPDFTFGFEESLEVDTNPLLGAGKFATDPAVTLAHEL |
| | E1204V/W1 | IHAGHRLYGIAINPNRVFKVNTNAYYEMSGLEVSFEELRTFGGHDAKFIDSLQEN |
| | 191Q/I1262 | EFRLYYYNKFKDIASTLNKAKSIVGTTASLQYMKNVFKEKYLLSEDTSGKFSVDK |
| | W/V1262W | LKFDKLYKMLTEIYTEDNFVKFFKVLNRKTYLNFDKAVFKINIVPKVNYTIYDGF |
| | | NLRNTNLAANFNGQNTEINNMNFTKLKNFTGLFEFYKLLCVRGIITSKTKSLDKG |
| | | YNKALNDLCIKVNNWDLFFSPSEDNFTNDLNKGEEITSDTNIEAAEENISLDLIQQ |
| | | YYLTFNFDNEPENISIENLSSDIIGQLELMPNIERFPNGKKYELDKYTMFHYLRAQE |
| | | FEHGKSRIALTNSVNEALLNPSRVYTFFSSDYVKKVNKATEAAMFLGWVEQLVY |
| | | DFTDETSEVSTTDKIADITIIIPYIGPALNIGNMLYKDDFVGALIFSGAVILLEFIPEIA |
| | | IPVLGTFALVSYIANKVLTVQTIDNALSKRNEKWDEVYKYIVTNWLAKVNTQIDL |
| | | IRKKMKEALENQAEATKAIINYQYNQYTEEEKNNINFNIDDLSSKLNESINKAMIN |
| | | INKFLNQCSVSYLMNSMIPYGVKRLEDFDASLKDALLKYIYDNRGTLIGQVDRLK |
| | | DKVNNTLSTDIPFQLSKYVDNQRLLSTFTEYIKNILNNIILNLRYKDNNLIDLSGYG |
| | | AKVEVYDGVELNDKNQFKLTSSANSKIRVTQNQNIIFNSVFLDFSVSFWIRIPKYK |
| | | NDGIQNYIHNEYTIINCMKNNSGWKISIRGNRIIWTLIDINGKTKSVFFEYNIREDIS |
| | | EYINRWFFVTITNNLNNAKIYINGKLESNTDIKDIREVIANGEIIFKLDGDIDRTQFI |
| | | WMKYFSIFNTELSQSNIEERYKIQSYSEYLKDFWGNPLMYNKEYYMFNAGNKNS |
| | | YIKLKKDSPVGEILTRSKYNQNSKYINYRDLYIGEKFIIRRKSNSQSINDDIVRKED |
| | | YIYLDFFNLNQEQRVYTYKYFKKEEVKLFLAPISDSDEFYNTIQIKEYDEQPTYSC |
| | | QLLFKKDEESTDEIGLIGIHRFYESGWWFEEYKDYFCISKWYLKEVKRKPYNLKL |
| | | GCNWQFIPKDEGWTE |
| 57 | Chimeric | MPFVNKQFNYKDPVNGVDIAYIKIPNAGQMQPVKAFKIHNKIWVIPERDTFTNPE |
| | toxin | EGDLNPPPEAKQVPVSYYDSTYLSTDNEKDNYLKGVTKLFERIYSTDLGRMLLTS |
| | BoNT/A1- | IVRGIPFWGGSTIDTELKVIDTNCINVIQPDGSYRSEELNLVIIGPSADIIQFECKSFG |
| | B1 | HEVLNLTRNGYGSTQYIRFSPDFTFGFEESLEVDTNPLLGAGKFATDPAVTLAHEL |
| | E1204Q/S12 | IHAGHRLYGIAINPNRVFKVNTNAYYEMSGLEVSFEELRTFGGHDAKFIDSLQEN |
| | 12Y/I1261 | EFRLYYYNKFKDIASTLNKAKSIVGTTASLQYMKNVFKEKYLLSEDTSGKFSVDK |
| | W/V1262W | LKFDKLYKMLTEIYTEDNFVKFFKVLNRKTYLNFDKAVFKINIVPKVNYTIYDGF |
| | | NLRNTNLAANFNGQNTEINNMNFTKLKNFTGLFEFYKLLCVRGIITSKTKSLDKG |
| | | YNKALNDLCIKVNNWDLFFSPSEDNFTNDLNKGEEITSDTNIEAAEENISLDLIQQ |
| | | YYLTFNFDNEPENISIENLSSDIIGQLELMPNIERFPNGKKYELDKYTMFHYLRAQE |
| | | FEHGKSRIALTNSVNEALLNPSRVYTFFSSDYVKKVNKATEAAMFLGWVEQLVY |
| | | DFTDETSEVSTTDKIADITIIIPYIGPALNIGNMLYKDDFVGALIFSGAVILLEFIPEIA |
| | | IPVLGTFALVSYIANKVLTVQTIDNALSKRNEKWDEVYKYIVTNWLAKVNTQIDL |
| | | IRKKMKEALENQAEATKAIINYQYNQYTEEEKNNINFNIDDLSSKLNESINKAMIN |
| | | INKFLNQCSVSYLMNSMIPYGVKRLEDFDASLKDALLKYIYDNRGTLIGQVDRLK |
| | | DKVNNTLSTDIPFQLSKYVDNQRLLSTFTEYIKNILNNIILNLRYKDNNLIDLSGYG |
| | | AKVEVYDGVELNDKNQFKLTSSANSKIRVTQNQNIIFNSVFLDFSVSFWIRIPKYK |
| | | NDGIQNYIHNEYTIINCMKNNSGWKISIRGNRIIWTLIDINGKTKSVFFEYNIREDIS |
| | | EYINRWFFVTITNNLNNAKIYINGKLESNTDIKDIREVIANGEIIFKLDGDIDRTQFI |
| | | WMKYFSIFNTELSQSNIEERYKIQSYSEYLKDFWGNPLMYNKEYYMFNAGNKNS |
| | | YIKLKKDSPVGEILTRSKYNQNSKYINYRDLYIGEKFIIRRKSNSQSINDDIVRKED |
| | | YIYLDFFNLNQEWRVYTYKYFKKEEQKLFLAPIYDSDEFYNTIQIKEYDEQPTYSC |
| | | QLLFKKDEESTDEIGLIGIHRFYESGWWFEEYKDYFCISKWYLKEVKRKPYNLKL |
| | | GCNWQFIPKDEGWTE |
| 58 | WT | MKLEINKFNYNDPIDGINVITMRPPRHSDKINKGKGPFKAFQVIKNIWIVPERYNF |
| | BoNT/X | TNNTNDLNIPSEPIMEADAIYNPNYLNTPSEKDEFLQGVIKVLERIKSKPEGEKLLE |
| | | LISSSIPLPLVSNGALTLSDNETIAYQENNNIVSNLQANLVIYGPGPDIANNATYGL |
| | | YSTPISNGEGTLSEVSFSPFYLKPFDESYGNYRSLVNIVNKFVKREFAPDPASTLM |
| | | HELVHVTHNLYGISNRNFYYNFDTGKIETSRQQNSLIFEELLTFGGIDSKAISSLII |
| | | KKIIETAKNNYTTLISERLNTVTVENDLLKYIKNKIPVQGRLGNFKLDTAEFEKKL |
| | | NTILFVLNESNLAQRFSILVRKHYLKERPIDPIYVNILDDNSYSTLEGFNISSQGSND |
| | | FQGQLLESSYFEKIESNALRAFIKICPRNGLLYNAIYRNSKNYLNNIDLEDKKTTSK |
| | | TNVSYPCSLLNGCIEVENKDLFLISNKDSLNDINLSEEKIKPETTVFFKDKLPPQDIT |
| | | LSNYDFTEANSIPSISQQNILERNEELYEPIRNSLFEIKTIYVDKLTTFHFLEAQNIDE |
| | | SIDSSKIRVELTDSVDEALSNPNKVYSPFKNMSNTINSIETGITSTYIFYQWLRSIVK |
| | | DFSDETGKIDVIDKSSDTLAIVPYIGPLLNIGNDIRHGDFVGAIELAGITALLEYVPE |
| | | FTIPILVGLEVIGGELAREQVEAIVNNALDKRDQKWAEVYNITKAQWWGTIHLQI |
| | | NTRLAHTYKALSRQANAIKMNMEFQLANYKGNIDDKAKIKNAISETEILLNKSVE |
| | | QAMKNTEKFMIKLSNSYLTKEMIPKVQDNLKNFDLETKKTLDKFIKEKEDILGTN |
| | | LSSSLRRKVSIRLNKNIAFDINDIPFSEFDDLINQYKNEIEDYEVLNLGAEDGKIKD |
| | | LSGTTSDINIGSDIELADGRENKAIKIKGSENSTIKIAMNKYLRFSATDNFSISFWIK |
| | | HPKPTNLLNNGIEYTLVENFNQRGWKISIQDSKLIWYLRDHNNSIKIVTPDYIAFN |
| | | GWNLITITNNRSKGSIVYVNGSKIEEKDISSIWNTEVDDPIIFRLKNNRDTQAFTLL |
| | | DQFSIYRKELNQNEVVKLYNYYFNSNYIRDIWGNPLQYNKKYYLQTQDKPGKGL |
| | | IREYWSSFGYDYVILSDSKTITFPNNIRYGALYNGSKVLIKNSKKLDGLVRNKDFI |
| | | QLEIDGYNMGISADRFNEDTNYIGTTYGTTHDLTTDFEIIQRQEKYRNYCQLKTP |
| | | YNIFHKSGLMSTETSKPTFHDYRDWVYSSAWYFQNYENLNLRKHTKTNWYFIPK |
| | | DEGWDED |
| 59 | WT | MKLEINKFNYNDPIDGINVITMRPPRHSDKINKGKGPFKAFQVIKNIWIVPERYNF |
| | BoNT/X | TNNTNDLNIPSEPIMEADAIYNPNYLNTPSEKDEFLQGVIKVLERIKSKPEGEKLLE |
| | LC-H_{N} | LISSSIPLPLVSNGALTLSDNETIAYQENNNIVSNLQANLVIYGPGPDIANNATYGL |
| | | YSTPISNGEGTLSEVSFSPFYLKPFDESYGNYRSLVNIVNKFVKREFAPDPASTLM |
| | | HELVHVTHNLYGISNRNFYYNFDTGKIETSRQQNSLIFEELLTFGGIDSKAISSLII |
| | | KKIIETAKNNYTTLISERLNTVTVENDLLKYIKNKIPVQGRLGNFKLDTAEFEKKL |
| | | NTILFVLNESNLAQRFSILVRKHYLKERPIDPIYVNILDDNSYSTLEGFNISSQGSND |
| | | FQGQLLESSYFEKIESNALRAFIKICPRNGLLYNAIYRNSKNYLNNIDLEDKKTTSK |
| | | TNVSYPCSLLNGCIEVENKDLFLISNKDSLNDINLSEEKIKPETTVFFKDKLPPQDIT |
| | | LSNYDFTEANSIPSISQQNILERNEELYEPIRNSLFEIKTIYVDKLTTFHFLEAQNIDE |
| | | SIDSSKIRVELTDSVDEALSNPNKVYSPFKNMSNTINSIETGITSTYIFYQWLRSIVK |
| | | DFSDETGKIDVIDKSSDTLAIVPYIGPLLNIGNDIRHGDFVGAIELAGITALLEYVPE |
| | | FTIPILVGLEVIGGELAREQVEAIVNNALDKRDQKWAEVYNITKAQWWGTIHLQI |
| | | NTRLAHTYKALSRQANAIKMNMEFQLANYKGNIDDKAKIKNAISETEILLNKSVE |
| | | QAMKNTEKFMIKLSNSYLTKEMIPKVQDNLKNFDLETKKTLDKFIKEKEDILGTN |
| | | LSSSLRRKVSIRLNKNIAFDINDIPFSEFDDLINQYKNEI |
| 60 | WT | MKLEINKFNYNDPIDGINVITMRPPRHSDKINKGKGPFKAFQVIKNIWIVPERYNF |
| | BoNT/X | TNNTNDLNIPSEPIMEADAIYNPNYLNTPSEKDEFLQGVIKVLERIKSKPEGEKLLE |
| | LC | LISSSIPLPLVSNGALTLSDNETIAYQENNNIVSNLQANLVIYGPGPDIANNATYGL |
| | | YSTPISNGEGTLSEVSFSPFYLKPFDESYGNYRSLVNIVNKFVKREFAPDPASTLM |
| | | HELVHVTHNLYGISNRNFYYNFDTGKIETSRQQNSLIFEELLTFGGIDSKAISSLIIK |
| | | KIIETAKNNYTTLISERLNTVTVENDLLKYIKNKIPVQGRLGNFKLDTAEFEKKLN |
| | | TILFVLNESNLAQRFSILVRKHYLKERPIDPIYVNILDDNSYSTLEGFNISSQGSNDF |
| | | QGQLLESSYFEKIESNALRAFIKICPRNGLLYNAIYRNSKN |
| 61 | WT | MKLEINKFNYNDPIDGINVITMRPPRHSDKINKGKGPFKAFQVIKNIWIVPERYNF |
| | BoNT/X | TNNTNDLNIPSEPIMEADAIYNPNYLNTPSEKDEFLQGVIKVLERIKSKPEGEKLLE |
| | C461S | LISSSIPLPLVSNGALTLSDNETIAYQENNNIVSNLQANLVIYGPGPDIANNATYGL |
| | | YSTPISNGEGTLSEVSFSPFYLKPFDESYGNYRSLVNIVNKFVKREFAPDPASTLM |
| | | HELVHVTHNLYGISNRNFYYNFDTGKIETSRQQNSLIFEELLTFGGIDSKAISSLIIK |
| | | KIIETAKNNYTTLISERLNTVTVENDLLKYIKNKIPVQGRLGNFKLDTAEFEKKLN |
| | | TILFVLNESNLAQRFSILVRKHYLKERPIDPIYVNILDDNSYSTLEGFNISSQGSNDF |
| | | QGQLLESSYFEKIESNALRAFIKICPRNGLLYNAIYRNSKNYLNNIDLEDKKTTSK |
| | | TNVSYPSSLLNGCIEVENKDLFLISNKDSLNDINLSEEKIKPETTVFFKDKLPPQDIT |
| | | LSNYDFTEANSIPSISQQNILERNEELYEPIRNSLFEIKTIYVDKLTTFHFLEAQNIDE |
| | | SIDSSKIRVELTDSVDEALSNPNKVYSPFKNMSNTINSIETGITSTYIFYQWLRSIVK |
| | | DFSDETGKIDVIDKSSDTLAIVPYIGPLLNIGNDIRHGDFVGAIELAGITALLEYVPE |
| | | FTIPILVGLEVIGGELAREQVEAIVNNALDKRDQKWAEVYNITKAQWWGTIHLQI |
| | | NTRLAHTYKALSRQANAIKMNMEFQLANYKGNIDDKAKIKNAISETEILLNKSVE |
| | | QAMKNTEKFMIKLSNSYLTKEMIPKVQDNLKNFDLETKKTLDKFIKEKEDILGTN |
| | | LSSSLRRKVSIRLNKNIAFDINDIPFSEFDDLINQYKNEIEDYEVLNLGAEDGKIKD |
| | | LSGTTSDINIGSDIELADGRENKAIKIKGSENSTIKIAMNKYLRFSATDNFSISFWIK |
| | | HPKPTNLLNNGIEYTLVENFNQRGWKISIQDSKLIWYLRDHNNSIKIVTPDYIAFN |
| | | GWNLITITNNRSKGSIVYVNGSKIEEKDISSIWNTEVDDPIIFRLKNNRDTQAFTLL |
| | | DQFSIYRKELNQNEVVKLYNYYFNSNYIRDIWGNPLQYNKKYYLQTQDKPGKGL |
| | | IREYWSSFGYDYVILSDSKTITFPNNIRYGALYNGSKVLIKNSKKLDGLVRNKDFI |
| | | QLEIDGYNMGISADRFNEDTNYIGTTYGTTHDLTTDFEIIQRQEKYRNYCQLKTP |
| | | YNIFHKSGLMSTETSKPTFHDYRDWVYSSAWYFQNYENLNLRKHTKTNWYFIPK |
| | | DEGWDED |
| 62 | WT | MKLEINKFNYNDPIDGINVITMRPPRHSDKINKGKGPFKAFQVIKNIWIVPERYNF |
| | BoNT/X | TNNTNDLNIPSEPIMEADAIYNPNYLNTPSEKDEFLQGVIKVLERIKSKPEGEKLLE |
| | C461A | LISSSIPLPLVSNGALTLSDNETIAYQENNNIVSNLQANLVIYGPGPDIANNATYGL |
| | | YSTPISNGEGTLSEVSFSPFYLKPFDESYGNYRSLVNIVNKFVKREFAPDPASTLM |
| | | HELVHVTHNLYGISNRNFYYNFDTGKIETSRQQNSLIFEELLTFGGIDSKAISSLIIK |
| | | KIIETAKNNYTTLISERLNTVTVENDLLKYIKNKIPVQGRLGNFKLDTAEFEKKLN |
| | | TILFVLNESNLAQRFSILVRKHYLKERPIDPIYVNILDDNSYSTLEGFNISSQGSNDF |
| | | QGQLLESSYFEKIESNALRAFIKICPRNGLLYNAIYRNSKNYLNNIDLEDKKTTSK |
| | | TNVSYPASLLNGCIEVENKDLFLISNKDSLNDINLSEEKIKPETTVFFKDKLPPQDI |
| | | TLSNYDFTEANSIPSISQQNILERNEELYEPIRNSLFEIKTIYVDKLTTFHFLEAQNID |
| | | ESIDSSKIRVELTDSVDEALSNPNKVYSPFKNMSNTINSIETGITSTYIFYQWLRSIV |
| | | KDFSDETGKIDVIDKSSDTLAIVPYIGPLLNIGNDIRHGDFVGAIELAGITALLEYVP |
| | | EFTIPILVGLEVIGGELAREQVEAIVNNALDKRDQKWAEVYNITKAQWWGTIHLQ |
| | | INTRLAHTYKALSRQANAIKMNMEFQLANYKGNIDDKAKIKNAISETEILLNKSV |
| | | EQAMKNTEKFMIKLSNSYLTKEMIPKVQDNLKNFDLETKKTLDKFIKEKEDILGT |
| | | NLSSSLRRKVSIRLNKNIAFDINDIPFSEFDDLINQYKNEIEDYEVLNLGAEDGKIK |
| | | DLSGTTSDINIGSDIELADGRENKAIKIKGSENSTIKIAMNKYLRFSATDNFSISFWI |
| | | KHPKPTNLLNNGIEYTLVENFNQRGWKISIQDSKLIWYLRDHNNSIKIVTPDYIAF |
| | | NGWNLITITNNRSKGSIVYVNGSKIEEKDISSIWNTEVDDPIIFRLKNNRDTQAFTL |
| | | LDQFSIYRKELNQNEVVKLYNYYFNSNYIRDIWGNPLQYNKKYYLQTQDKPGKG |
| | | LIREYWSSFGYDYVILSDSKTITFPNNIRYGALYNGSKVLIKNSKKLDGLVRNKDF |
| | | IQLEIDGYNMGISADRFNEDTNYIGTTYGTTHDLTTDFEIIQRQEKYRNYCQLKTP |
| | | YNIFHKSGLMSTETSKPTFHDYRDWVYSSAWYFQNYENLNLRKHTKTNWYFIPK |
| | | DEGWDED |
| 63 | WT | MKLEINKFNYNDPIDGINVITMRPPRHSDKINKGKGPFKAFQVIKNIWIVPERYNF |
| | BoNT/X | TNNTNDLNIPSEPIMEADAIYNPNYLNTPSEKDEFLQGVIKVLERIKSKPEGEKLLE |
| | C467S | LISSSIPLPLVSNGALTLSDNETIAYQENNNIVSNLQANLVIYGPGPDIANNATYGL |
| | | YSTPISNGEGTLSEVSFSPFYLKPFDESYGNYRSLVNIVNKFVKREFAPDPASTLM |
| | | HELVHVTHNLYGISNRNFYYNFDTGKIETSRQQNSLIFEELLTFGGIDSKAISSLIIK |
| | | KIIETAKNNYTTLISERLNTVTVENDLLKYIKNKIPVQGRLGNFKLDTAEFEKKLN |
| | | TILFVLNESNLAQRFSILVRKHYLKERPIDPIYVNILDDNSYSTLEGFNISSQGSNDF |
| | | QGQLLESSYFEKIESNALRAFIKICPRNGLLYNAIYRNSKNYLNNIDLEDKKTTSK |
| | | TNVSYPCSLLNGSIEVENKDLFLISNKDSLNDINLSEEKIKPETTVFFKDKLPPQDIT |
| | | LSNYDFTEANSIPSISQQNILERNEELYEPIRNSLFEIKTIYVDKLTTFHFLEAQNIDE |
| | | SIDSSKIRVELTDSVDEALSNPNKVYSPFKNMSNTINSIETGITSTYIFYQWLRSIVK |
| | | DFSDETGKIDVIDKSSDTLAIVPYIGPLLNIGNDIRHGDFVGAIELAGITALLEYVPE |
| | | FTIPILVGLEVIGGELAREQVEAIVNNALDKRDQKWAEVYNITKAQWWGTIHLQI |
| | | NTRLAHTYKALSRQANAIKMNMEFQLANYKGNIDDKAKIKNAISETEILLNKSVE |
| | | QAMKNTEKFMIKLSNSYLTKEMIPKVQDNLKNFDLETKKTLDKFIKEKEDILGTN |
| | | LSSSLRRKVSIRLNKNIAFDINDIPFSEFDDLINQYKNEIEDYEVLNLGAEDGKIKD |
| | | LSGTTSDINIGSDIELADGRENKAIKIKGSENSTIKIAMNKYLRFSATDNFSISFWIK |
| | | HPKPTNLLNNGIEYTLVENFNQRGWKISIQDSKLIWYLRDHNNSIKIVTPDYIAFN |
| | | GWNLITITNNRSKGSIVYVNGSKIEEKDISSIWNTEVDDPIIFRLKNNRDTQAFTLL |
| | | DQFSIYRKELNQNEVVKLYNYYFNSNYIRDIWGNPLQYNKKYYLQTQDKPGKGL |
| | | IREYWSSFGYDYVILSDSKTITFPNNIRYGALYNGSKVLIKNSKKLDGLVRNKDFI |
| | | QLEIDGYNMGISADRFNEDTNYIGTTYGTTHDLTTDFEIIQRQEKYRNYCQLKTP |
| | | YNIFHKSGLMSTETSKPTFHDYRDWVYSSAWYFQNYENLNLRKHTKTNWYFIPK |
| | | DEGWDED |
| 64 | WT | MKLEINKFNYNDPIDGINVITMRPPRHSDKINKGKGPFKAFQVIKNIWIVPERYNF |
| | BoNT/X | TNNTNDLNIPSEPIMEADAIYNPNYLNTPSEKDEFLQGVIKVLERIKSKPEGEKLLE |
| | C467A | LISSSIPLPLVSNGALTLSDNETIAYQENNNIVSNLQANLVIYGPGPDIANNATYGL |
| | | YSTPISNGEGTLSEVSFSPFYLKPFDESYGNYRSLVNIVNKFVKREFAPDPASTLM |
| | | HELVHVTHNLYGISNRNFYYNFDTGKIETSRQQNSLIFEELLTFGGIDSKAISSLIIK |
| | | KIIETAKNNYTTLISERLNTVTVENDLLKYIKNKIPVQGRLGNFKLDTAEFEKKLN |
| | | TILFVLNESNLAQRFSILVRKHYLKERPIDPIYVNILDDNSYSTLEGFNISSQGSNDF |
| | | QGQLLESSYFEKIESNALRAFIKICPRNGLLYNAIYRNSKNYLNNIDLEDKKTTSK |
| | | TNVSYPCSLLNGAIEVENKDLFLISNKDSLNDINLSEEKIKPETTVFFKDKLPPQDI |
| | | TLSNYDFTEANSIPSISQQNILERNEELYEPIRNSLFEIKTIYVDKLTTFHFLEAQNID |
| | | ESIDSSKIRVELTDSVDEALSNPNKVYSPFKNMSNTINSIETGITSTYIFYQWLRSIV |
| | | KDFSDETGKIDVIDKSSDTLAIVPYIGPLLNIGNDIRHGDFVGAIELAGITALLEYVP |
| | | EFTIPILVGLEVIGGELAREQVEAIVNNALDKRDQKWAEVYNITKAQWWGTIHLQ |
| | | INTRLAHTYKALSRQANAIKMNMEFQLANYKGNIDDKAKIKNAISETEILLNKSV |
| | | EQAMKNTEKFMIKLSNSYLTKEMIPKVQDNLKNFDLETKKTLDKFIKEKEDILGT |
| | | NLSSSLRRKVSIRLNKNIAFDINDIPFSEFDDLINQYKNEIEDYEVLNLGAEDGKIK |
| | | DLSGTTSDINIGSDIELADGRENKAIKIKGSENSTIKIAMNKYLRFSATDNFSISFWI |
| | | KHPKPTNLLNNGIEYTLVENFNQRGWKISIQDSKLIWYLRDHNNSIKIVTPDYIAF |
| | | NGWNLITITNNRSKGSIVYVNGSKIEEKDISSIWNTEVDDPIIFRLKNNRDTQAFTL |
| | | LDQFSIYRKELNQNEVVKLYNYYFNSNYIRDIWGNPLQYNKKYYLQTQDKPGKG |
| | | LIREYWSSFGYDYVILSDSKTITFPNNIRYGALYNGSKVLIKNSKKLDGLVRNKDF |
| | | IQLEIDGYNMGISADRFNEDTNYIGTTYGTTHDLTTDFEIIQRQEKYRNYCQLKTP |
| | | YNIFHKSGLMSTETSKPTFHDYRDWVYSSAWYFQNYENLNLRKHTKTNWYFIPK |
| | | DEGWDED |
| 65 | WT | MKLEINKFNYNDPIDGINVITMRPPRHSDKINKGKGPFKAFQVIKNIWIVPERYNF |
| | BoNT/X | TNNTNDLNIPSEPIMEADAIYNPNYLNTPSEKDEFLQGVIKVLERIKSKPEGEKLLE |
| | C1240S | LISSSIPLPLVSNGALTLSDNETIAYQENNNIVSNLQANLVIYGPGPDIANNATYGL |
| | | YSTPISNGEGTLSEVSFSPFYLKPFDESYGNYRSLVNIVNKFVKREFAPDPASTLM |
| | | HELVHVTHNLYGISNRNFYYNFDTGKIETSRQQNSLIFEELLTFGGIDSKAISSLIIK |
| | | KIIETAKNNYTTLISERLNTVTVENDLLKYIKNKIPVQGRLGNFKLDTAEFEKKLN |
| | | TILFVLNESNLAQRFSILVRKHYLKERPIDPIYVNILDDNSYSTLEGFNISSQGSNDF |
| | | QGQLLESSYFEKIESNALRAFIKICPRNGLLYNAIYRNSKNYLNNIDLEDKKTTSK |
| | | TNVSYPCSLLNGCIEVENKDLFLISNKDSLNDINLSEEKIKPETTVFFKDKLPPQDIT |
| | | LSNYDFTEANSIPSISQQNILERNEELYEPIRNSLFEIKTIYVDKLTTFHFLEAQNIDE |
| | | SIDSSKIRVELTDSVDEALSNPNKVYSPFKNMSNTINSIETGITSTYIFYQWLRSIVK |
| | | DFSDETGKIDVIDKSSDTLAIVPYIGPLLNIGNDIRHGDFVGAIELAGITALLEYVPE |
| | | FTIPILVGLEVIGGELAREQVEAIVNNALDKRDQKWAEVYNITKAQWWGTIHLQI |
| | | NTRLAHTYKALSRQANAIKMNMEFQLANYKGNIDDKAKIKNAISETEILLNKSVE |
| | | QAMKNTEKFMIKLSNSYLTKEMIPKVQDNLKNFDLETKKTLDKFIKEKEDILGTN |
| | | LSSSLRRKVSIRLNKNIAFDINDIPFSEFDDLINQYKNEIEDYEVLNLGAEDGKIKD |
| | | LSGTTSDINIGSDIELADGRENKAIKIKGSENSTIKIAMNKYLRFSATDNFSISFWIK |
| | | HPKPTNLLNNGIEYTLVENFNQRGWKISIQDSKLIWYLRDHNNSIKIVTPDYIAFN |
| | | GWNLITITNNRSKGSIVYVNGSKIEEKDISSIWNTEVDDPIIFRLKNNRDTQAFTLL |
| | | DQFSIYRKELNQNEVVKLYNYYFNSNYIRDIWGNPLQYNKKYYLQTQDKPGKGL |
| | | IREYWSSFGYDYVILSDSKTITFPNNIRYGALYNGSKVLIKNSKKLDGLVRNKDFI |
| | | QLEIDGYNMGISADRFNEDTNYIGTTYGTTHDLTTDFEIIQRQEKYRNYSQLKTPY |
| | | NIFHKSGLMSTETSKPTFHDYRDWVYSSAWYFQNYENLNLRKHTKTNWYFIPKD |
| | | EGWDED |
| 66 | WT | MKLEINKFNYNDPIDGINVITMRPPRHSDKINKGKGPFKAFQVIKNIWIVPERYNF |
| | BoNT/X | TNNTNDLNIPSEPIMEADAIYNPNYLNTPSEKDEFLQGVIKVLERIKSKPEGEKLLE |
| | C1240S | LISSSIPLPLVSNGALTLSDNETIAYQENNNIVSNLQANLVIYGPGPDIANNATYGL |
| | | YSTPISNGEGTLSEVSFSPFYLKPFDESYGNYRSLVNIVNKFVKREFAPDPASTLM |
| | | HELVHVTHNLYGISNRNFYYNFDTGKIETSRQQNSLIFEELLTFGGIDSKAISSLIIK |
| | | KIIETAKNNYTTLISERLNTVTVENDLLKYIKNKIPVQGRLGNFKLDTAEFEKKLN |
| | | TILFVLNESNLAQRFSILVRKHYLKERPIDPIYVNILDDNSYSTLEGFNISSQGSNDF |
| | | QGQLLESSYFEKIESNALRAFIKICPRNGLLYNAIYRNSKNYLNNIDLEDKKTTSK |
| | | TNVSYPCSLLNGCIEVENKDLFLISNKDSLNDINLSEEKIKPETTVFFKDKLPPQDIT |
| | | LSNYDFTEANSIPSISQQNILERNEELYEPIRNSLFEIKTIYVDKLTTFHFLEAQNIDE |
| | | SIDSSKIRVELTDSVDEALSNPNKVYSPFKNMSNTINSIETGITSTYIFYQWLRSIVK |
| | | DFSDETGKIDVIDKSSDTLAIVPYIGPLLNIGNDIRHGDFVGAIELAGITALLEYVPE |
| | | FTIPILVGLEVIGGELAREQVEAIVNNALDKRDQKWAEVYNITKAQWWGTIHLQI |
| | | NTRLAHTYKALSRQANAIKMNMEFQLANYKGNIDDKAKIKNAISETEILLNKSVE |
| | | QAMKNTEKFMIKLSNSYLTKEMIPKVQDNLKNFDLETKKTLDKFIKEKEDILGTN |
| | | LSSSLRRKVSIRLNKNIAFDINDIPFSEFDDLINQYKNEIEDYEVLNLGAEDGKIKD |
| | | LSGTTSDINIGSDIELADGRENKAIKIKGSENSTIKIAMNKYLRFSATDNFSISFWIK |
| | | HPKPTNLLNNGIEYTLVENFNQRGWKISIQDSKLIWYLRDHNNSIKIVTPDYIAFN |
| | | GWNLITITNNRSKGSIVYVNGSKIEEKDISSIWNTEVDDPIIFRLKNNRDTQAFTLL |
| | | DQFSIYRKELNQNEVVKLYNYYFNSNYIRDIWGNPLQYNKKYYLQTQDKPGKGL |
| | | IREYWSSFGYDYVILSDSKTITFPNNIRYGALYNGSKVLIKNSKKLDGLVRNKDFI |
| | | QLEIDGYNMGISADRFNEDTNYIGTTYGTTHDLTTDFEIIQRQEKYRNYAQLKTP |
| | | YNIFHKSGLMSTETSKPTFHDYRDWVYSSAWYFQNYENLNLRKHTKTNWYFIPK |
| | | DEGWDED |
| 67 | WT | MKLEINKFNYNDPIDGINVITMRPPRHSDKINKGKGPFKAFQVIKNIWIVPERYNF |
| | BoNT/X | TNNTNDLNIPSEPIMEADAIYNPNYLNTPSEKDEFLQGVIKVLERIKSKPEGEKLLE |
| | C461S/C124 | LISSSIPLPLVSNGALTLSDNETIAYQENNNIVSNLQANLVIYGPGPDIANNATYGL |
| | 0A | YSTPISNGEGTLSEVSFSPFYLKPFDESYGNYRSLVNIVNKFVKREFAPDPASTLM |
| | | HELVHVTHNLYGISNRNFYYNFDTGKIETSRQQNSLIFEELLTFGGIDSKAISSLIIK |
| | | KIIETAKNNYTTLISERLNTVTVENDLLKYIKNKIPVQGRLGNFKLDTAEFEKKLN |
| | | TILFVLNESNLAQRFSILVRKHYLKERPIDPIYVNILDDNSYSTLEGFNISSQGSNDF |
| | | QGQLLESSYFEKIESNALRAFIKICPRNGLLYNAIYRNSKNYLNNIDLEDKKTTSK |
| | | TNVSYPSSLLNGCIEVENKDLFLISNKDSLNDINLSEEKIKPETTVFFKDKLPPQDIT |
| | | LSNYDFTEANSIPSISQQNILERNEELYEPIRNSLFEIKTIYVDKLTTFHFLEAQNIDE |
| | | SIDSSKIRVELTDSVDEALSNPNKVYSPFKNMSNTINSIETGITSTYIFYQWLRSIVK |
| | | DFSDETGKIDVIDKSSDTLAIVPYIGPLLNIGNDIRHGDFVGAIELAGITALLEYVPE |
| | | FTIPILVGLEVIGGELAREQVEAIVNNALDKRDQKWAEVYNITKAQWWGTIHLQI |
| | | NTRLAHTYKALSRQANAIKMNMEFQLANYKGNIDDKAKIKNAISETEILLNKSVE |
| | | QAMKNTEKFMIKLSNSYLTKEMIPKVQDNLKNFDLETKKTLDKFIKEKEDILGTN |
| | | LSSSLRRKVSIRLNKNIAFDINDIPFSEFDDLINQYKNEIEDYEVLNLGAEDGKIKD |
| | | LSGTTSDINIGSDIELADGRENKAIKIKGSENSTIKIAMNKYLRFSATDNFSISFWIK |
| | | HPKPTNLLNNGIEYTLVENFNQRGWKISIQDSKLIWYLRDHNNSIKIVTPDYIAFN |
| | | GWNLITITNNRSKGSIVYVNGSKIEEKDISSIWNTEVDDPIIFRLKNNRDTQAFTLL |
| | | DQFSIYRKELNQNEVVKLYNYYFNSNYIRDIWGNPLQYNKKYYLQTQDKPGKGL |
| | | IREYWSSFGYDYVILSDSKTITFPNNIRYGALYNGSKVLIKNSKKLDGLVRNKDFI |
| | | QLEIDGYNMGISADRFNEDTNYIGTTYGTTHDLTTDFEIIQRQEKYRNYAQLKTP |
| | | YNIFHKSGLMSTETSKPTFHDYRDWVYSSAWYFQNYENLNLRKHTKTNWYFIPK |
| | | DEGWDED |
| 68 | WT | MKLEINKFNYNDPIDGINVITMRPPRHSDKINKGKGPFKAFQVIKNIWIVPERYNF |
| | BoNT/X | TNNTNDLNIPSEPIMEADAIYNPNYLNTPSEKDEFLQGVIKVLERIKSKPEGEKLLE |
| | C4615/C124 | LISSSIPLPLVSNGALTLSDNETIAYQENNNIVSNLQANLVIYGPGPDIANNATYGL |
| | 0S | YSTPISNGEGTLSEVSFSPFYLKPFDESYGNYRSLVNIVNKFVKREFAPDPASTLM |
| | | HELVHVTHNLYGISNRNFYYNFDTGKIETSRQQNSLIFEELLTFGGIDSKAISSLIIK |
| | | KIIETAKNNYTTLISERLNTVTVENDLLKYIKNKIPVQGRLGNFKLDTAEFEKKLN |
| | | TILFVLNESNLAQRFSILVRKHYLKERPIDPIYVNILDDNSYSTLEGFNISSQGSNDF |
| | | QGQLLESSYFEKIESNALRAFIKICPRNGLLYNAIYRNSKNYLNNIDLEDKKTTSK |
| | | TNVSYPSSLLNGCIEVENKDLFLISNKDSLNDINLSEEKIKPETTVFFKDKLPPQDIT |
| | | LSNYDFTEANSIPSISQQNILERNEELYEPIRNSLFEIKTIYVDKLTTFHFLEAQNIDE |
| | | SIDSSKIRVELTDSVDEALSNPNKVYSPFKNMSNTINSIETGITSTYIFYQWLRSIVK |
| | | DFSDETGKIDVIDKSSDTLAIVPYIGPLLNIGNDIRHGDFVGAIELAGITALLEYVPE |
| | | FTIPILVGLEVIGGELAREQVEAIVNNALDKRDQKWAEVYNITKAQWWGTIHLQI |
| | | NTRLAHTYKALSRQANAIKMNMEFQLANYKGNIDDKAKIKNAISETEILLNKSVE |
| | | QAMKNTEKFMIKLSNSYLTKEMIPKVQDNLKNFDLETKKTLDKFIKEKEDILGTN |
| | | LSSSLRRKVSIRLNKNIAFDINDIPFSEFDDLINQYKNEIEDYEVLNLGAEDGKIKD |
| | | LSGTTSDINIGSDIELADGRENKAIKIKGSENSTIKIAMNKYLRFSATDNFSISFWIK |
| | | HPKPTNLLNNGIEYTLVENFNQRGWKISIQDSKLIWYLRDHNNSIKIVTPDYIAFN |
| | | GWNLITITNNRSKGSIVYVNGSKIEEKDISSIWNTEVDDPIIFRLKNNRDTQAFTLL |
| | | DQFSIYRKELNQNEVVKLYNYYFNSNYIRDIWGNPLQYNKKYYLQTQDKPGKGL |
| | | IREYWSSFGYDYVILSDSKTITFPNNIRYGALYNGSKVLIKNSKKLDGLVRNKDFI |
| | | QLEIDGYNMGISADRFNEDTNYIGTTYGTTHDLTTDFEIIQRQEKYRNYSQLKTPY |
| | | NIFHKSGLMSTETSKPTFHDYRDWVYSSAWYFQNYENLNLRKHTKTNWYFIPKD |
| | | EGWDED |
| 69 | WT | MKLEINKFNYNDPIDGINVITMRPPRHSDKINKGKGPFKAFQVIKNIWIVPERYNF |
| | BoNT/X | TNNTNDLNIPSEPIMEADAIYNPNYLNTPSEKDEFLQGVIKVLERIKSKPEGEKLLE |
| | C461A/C12 | LISSSIPLPLVSNGALTLSDNETIAYQENNNIVSNLQANLVIYGPGPDIANNATYGL |
| | 40S | YSTPISNGEGTLSEVSFSPFYLKPFDESYGNYRSLVNIVNKFVKREFAPDPASTLM |
| | | HELVHVTHNLYGISNRNFYYNFDTGKIETSRQQNSLIFEELLTFGGIDSKAISSLIIK |
| | | KIIETAKNNYTTLISERLNTVTVENDLLKYIKNKIPVQGRLGNFKLDTAEFEKKLN |
| | | TILFVLNESNLAQRFSILVRKHYLKERPIDPIYVNILDDNSYSTLEGFNISSQGSNDF |
| | | QGQLLESSYFEKIESNALRAFIKICPRNGLLYNAIYRNSKNYLNNIDLEDKKTTSK |
| | | TNVSYPASLLNGCIEVENKDLFLISNKDSLNDINLSEEKIKPETTVFFKDKLPPQDI |
| | | TLSNYDFTEANSIPSISQQNILERNEELYEPIRNSLFEIKTIYVDKLTTFHFLEAQNID |
| | | ESIDSSKIRVELTDSVDEALSNPNKVYSPFKNMSNTINSIETGITSTYIFYQWLRSIV |
| | | KDFSDETGKIDVIDKSSDTLAIVPYIGPLLNIGNDIRHGDFVGAIELAGITALLEYVP |
| | | EFTIPILVGLEVIGGELAREQVEAIVNNALDKRDQKWAEVYNITKAQWWGTIHLQ |
| | | INTRLAHTYKALSRQANAIKMNMEFQLANYKGNIDDKAKIKNAISETEILLNKSV |
| | | EQAMKNTEKFMIKLSNSYLTKEMIPKVQDNLKNFDLETKKTLDKFIKEKEDILGT |
| | | NLSSSLRRKVSIRLNKNIAFDINDIPFSEFDDLINQYKNEIEDYEVLNLGAEDGKIK |
| | | DLSGTTSDINIGSDIELADGRENKAIKIKGSENSTIKIAMNKYLRFSATDNFSISFWI |
| | | KHPKPTNLLNNGIEYTLVENFNQRGWKISIQDSKLIWYLRDHNNSIKIVTPDYIAF |
| | | NGWNLITITNNRSKGSIVYVNGSKIEEKDISSIWNTEVDDPIIFRLKNNRDTQAFTL |
| | | LDQFSIYRKELNQNEVVKLYNYYFNSNYIRDIWGNPLQYNKKYYLQTQDKPGKG |
| | | LIREYWSSFGYDYVILSDSKTITFPNNIRYGALYNGSKVLIKNSKKLDGLVRNKDF |
| | | IQLEIDGYNMGISADRFNEDTNYIGTTYGTTHDLTTDFEIIQRQEKYRNYSQLKTP |
| | | YNIFHKSGLMSTETSKPTFHDYRDWVYSSAWYFQNYENLNLRKHTKTNWYFIPK |
| | | DEGWDED |
| 70 | WT | MKLEINKFNYNDPIDGINVITMRPPRHSDKINKGKGPFKAFQVIKNIWIVPERYNF |
| | BoNT/X | TNNTNDLNIPSEPIMEADAIYNPNYLNTPSEKDEFLQGVIKVLERIKSKPEGEKLLE |
| | C461A/C12 | LISSSIPLPLVSNGALTLSDNETIAYQENNNIVSNLQANLVIYGPGPDIANNATYGL |
| | 40A | YSTPISNGEGTLSEVSFSPFYLKPFDESYGNYRSLVNIVNKFVKREFAPDPASTLM |
| | | HELVHVTHNLYGISNRNFYYNFDTGKIETSRQQNSLIFEELLTFGGIDSKAISSLIIK |
| | | KIIETAKNNYTTLISERLNTVTVENDLLKYIKNKIPVQGRLGNFKLDTAEFEKKLN |
| | | TILFVLNESNLAQRFSILVRKHYLKERPIDPIYVNILDDNSYSTLEGFNISSQGSNDF |
| | | QGQLLESSYFEKIESNALRAFIKICPRNGLLYNAIYRNSKNYLNNIDLEDKKTTSK |
| | | TNVSYPASLLNGCIEVENKDLFLISNKDSLNDINLSEEKIKPETTVFFKDKLPPQDI |
| | | TLSNYDFTEANSIPSISQQNILERNEELYEPIRNSLFEIKTIYVDKLTTFHFLEAQNID |
| | | ESIDSSKIRVELTDSVDEALSNPNKVYSPFKNMSNTINSIETGITSTYIFYQWLRSIV |
| | | KDFSDETGKIDVIDKSSDTLAIVPYIGPLLNIGNDIRHGDFVGAIELAGITALLEYVP |
| | | EFTIPILVGLEVIGGELAREQVEAIVNNALDKRDQKWAEVYNITKAQWWGTIHLQ |
| | | INTRLAHTYKALSRQANAIKMNMEFQLANYKGNIDDKAKIKNAISETEILLNKSV |
| | | EQAMKNTEKFMIKLSNSYLTKEMIPKVQDNLKNFDLETKKTLDKFIKEKEDILGT |
| | | NLSSSLRRKVSIRLNKNIAFDINDIPFSEFDDLINQYKNEIEDYEVLNLGAEDGKIK |
| | | DLSGTTSDINIGSDIELADGRENKAIKIKGSENSTIKIAMNKYLRFSATDNFSISFWI |
| | | KHPKPTNLLNNGIEYTLVENFNQRGWKISIQDSKLIWYLRDHNNSIKIVTPDYIAF |
| | | NGWNLITITNNRSKGSIVYVNGSKIEEKDISSIWNTEVDDPIIFRLKNNRDTQAFTL |
| | | LDQFSIYRKELNQNEVVKLYNYYFNSNYIRDIWGNPLQYNKKYYLQTQDKPGKG |
| | | LIREYWSSFGYDYVILSDSKTITFPNNIRYGALYNGSKVLIKNSKKLDGLVRNKDF |
| | | IQLEIDGYNMGISADRFNEDTNYIGTTYGTTHDLTTDFEIIQRQEKYRNYAQLKTP |
| | | YNIFHKSGLMSTETSKPTFHDYRDWVYSSAWYFQNYENLNLRKHTKTNWYFIPK |
| | | DEGWDED |
| 71 | WT | MKLEINKFNYNDPIDGINVITMRPPRHSDKINKGKGPFKAFQVIKNIWIVPERYNF |
| | BoNT/X | TNNTNDLNIPSEPIMEADAIYNPNYLNTPSEKDEFLQGVIKVLERIKSKPEGEKLLE |
| | C4675/C124 | LISSSIPLPLVSNGALTLSDNETIAYQENNNIVSNLQANLVIYGPGPDIANNATYGL |
| | 0A | YSTPISNGEGTLSEVSFSPFYLKPFDESYGNYRSLVNIVNKFVKREFAPDPASTLM |
| | | HELVHVTHNLYGISNRNFYYNFDTGKIETSRQQNSLIFEELLTFGGIDSKAISSLIIK |
| | | KIIETAKNNYTTLISERLNTVTVENDLLKYIKNKIPVQGRLGNFKLDTAEFEKKLN |
| | | TILFVLNESNLAQRFSILVRKHYLKERPIDPIYVNILDDNSYSTLEGFNISSQGSNDF |
| | | QGQLLESSYFEKIESNALRAFIKICPRNGLLYNAIYRNSKNYLNNIDLEDKKTTSK |
| | | TNVSYPCSLLNGSIEVENKDLFLISNKDSLNDINLSEEKIKPETTVFFKDKLPPQDIT |
| | | LSNYDFTEANSIPSISQQNILERNEELYEPIRNSLFEIKTIYVDKLTTFHFLEAQNIDE |
| | | SIDSSKIRVELTDSVDEALSNPNKVYSPFKNMSNTINSIETGITSTYIFYQWLRSIVK |
| | | DFSDETGKIDVIDKSSDTLAIVPYIGPLLNIGNDIRHGDFVGAIELAGITALLEYVPE |
| | | FTIPILVGLEVIGGELAREQVEAIVNNALDKRDQKWAEVYNITKAQWWGTIHLQI |
| | | NTRLAHTYKALSRQANAIKMNMEFQLANYKGNIDDKAKIKNAISETEILLNKSVE |
| | | QAMKNTEKFMIKLSNSYLTKEMIPKVQDNLKNFDLETKKTLDKFIKEKEDILGTN |
| | | LSSSLRRKVSIRLNKNIAFDINDIPFSEFDDLINQYKNEIEDYEVLNLGAEDGKIKD |
| | | LSGTTSDINIGSDIELADGRENKAIKIKGSENSTIKIAMNKYLRFSATDNFSISFWIK |
| | | HPKPTNLLNNGIEYTLVENFNQRGWKISIQDSKLIWYLRDHNNSIKIVTPDYIAFN |
| | | GWNLITITNNRSKGSIVYVNGSKIEEKDISSIWNTEVDDPIIFRLKNNRDTQAFTLL |
| | | DQFSIYRKELNQNEVVKLYNYYFNSNYIRDIWGNPLQYNKKYYLQTQDKPGKGL |
| | | IREYWSSFGYDYVILSDSKTITFPNNIRYGALYNGSKVLIKNSKKLDGLVRNKDFI |
| | | QLEIDGYNMGISADRFNEDTNYIGTTYGTTHDLTTDFEIIQRQEKYRNYAQLKTP |
| | | YNIFHKSGLMSTETSKPTFHDYRDWVYSSAWYFQNYENLNLRKHTKTNWYFIPK |
| | | DEGWDED |
| 72 | WT | MKLEINKFNYNDPIDGINVITMRPPRHSDKINKGKGPFKAFQVIKNIWIVPERYNF |
| | BoNT/X | TNNTNDLNIPSEPIMEADAIYNPNYLNTPSEKDEFLQGVIKVLERIKSKPEGEKLLE |
| | C467S/C124 | LISSSIPLPLVSNGALTLSDNETIAYQENNNIVSNLQANLVIYGPGPDIANNATYGL |
| | 0S | YSTPISNGEGTLSEVSFSPFYLKPFDESYGNYRSLVNIVNKFVKREFAPDPASTLM |
| | | HELVHVTHNLYGISNRNFYYNFDTGKIETSRQQNSLIFEELLTFGGIDSKAISSLIIK |
| | | KIIETAKNNYTTLISERLNTVTVENDLLKYIKNKIPVQGRLGNFKLDTAEFEKKLN |
| | | TILFVLNESNLAQRFSILVRKHYLKERPIDPIYVNILDDNSYSTLEGFNISSQGSNDF |
| | | QGQLLESSYFEKIESNALRAFIKICPRNGLLYNAIYRNSKNYLNNIDLEDKKTTSK |
| | | TNVSYPCSLLNGSIEVENKDLFLISNKDSLNDINLSEEKIKPETTVFFKDKLPPQDIT |
| | | LSNYDFTEANSIPSISQQNILERNEELYEPIRNSLFEIKTIYVDKLTTFHFLEAQNIDE |
| | | SIDSSKIRVELTDSVDEALSNPNKVYSPFKNMSNTINSIETGITSTYIFYQWLRSIVK |
| | | DFSDETGKIDVIDKSSDTLAIVPYIGPLLNIGNDIRHGDFVGAIELAGITALLEYVPE |
| | | FTIPILVGLEVIGGELAREQVEAIVNNALDKRDQKWAEVYNITKAQWWGTIHLQI |
| | | NTRLAHTYKALSRQANAIKMNMEFQLANYKGNIDDKAKIKNAISETEILLNKSVE |
| | | QAMKNTEKFMIKLSNSYLTKEMIPKVQDNLKNFDLETKKTLDKFIKEKEDILGTN |
| | | LSSSLRRKVSIRLNKNIAFDINDIPFSEFDDLINQYKNEIEDYEVLNLGAEDGKIKD |
| | | LSGTTSDINIGSDIELADGRENKAIKIKGSENSTIKIAMNKYLRFSATDNFSISFWIK |
| | | HPKPTNLLNNGIEYTLVENFNQRGWKISIQDSKLIWYLRDHNNSIKIVTPDYIAFN |
| | | GWNLITITNNRSKGSIVYVNGSKIEEKDISSIWNTEVDDPIIFRLKNNRDTQAFTLL |
| | | DQFSIYRKELNQNEVVKLYNYYFNSNYIRDIWGNPLQYNKKYYLQTQDKPGKGL |
| | | IREYWSSFGYDYVILSDSKTITFPNNIRYGALYNGSKVLIKNSKKLDGLVRNKDFI |
| | | QLEIDGYNMGISADRFNEDTNYIGTTYGTTHDLTTDFEIIQRQEKYRNYSQLKTPY |
| | | NIFHKSGLMSTETSKPTFHDYRDWVYSSAWYFQNYENLNLRKHTKTNWYFIPKD |
| | | EGWDED |
| 73 | WT | MKLEINKFNYNDPIDGINVITMRPPRHSDKINKGKGPFKAFQVIKNIWIVPERYNF |
| | BoNT/X | TNNTNDLNIPSEPIMEADAIYNPNYLNTPSEKDEFLQGVIKVLERIKSKPEGEKLLE |
| | C467A/C12 | LISSSIPLPLVSNGALTLSDNETIAYQENNNIVSNLQANLVIYGPGPDIANNATYGL |
| | 40S | YSTPISNGEGTLSEVSFSPFYLKPFDESYGNYRSLVNIVNKFVKREFAPDPASTLM |
| | | HELVHVTHNLYGISNRNFYYNFDTGKIETSRQQNSLIFEELLTFGGIDSKAISSLIIK |
| | | KIIETAKNNYTTLISERLNTVTVENDLLKYIKNKIPVQGRLGNFKLDTAEFEKKLN |
| | | TILFVLNESNLAQRFSILVRKHYLKERPIDPIYVNILDDNSYSTLEGFNISSQGSNDF |
| | | QGQLLESSYFEKIESNALRAFIKICPRNGLLYNAIYRNSKNYLNNIDLEDKKTTSK |
| | | TNVSYPCSLLNGAIEVENKDLFLISNKDSLNDINLSEEKIKPETTVFFKDKLPPQDI |
| | | TLSNYDFTEANSIPSISQQNILERNEELYEPIRNSLFEIKTIYVDKLTTFHFLEAQNID |
| | | ESIDSSKIRVELTDSVDEALSNPNKVYSPFKNMSNTINSIETGITSTYIFYQWLRSIV |
| | | KDFSDETGKIDVIDKSSDTLAIVPYIGPLLNIGNDIRHGDFVGAIELAGITALLEYVP |
| | | EFTIPILVGLEVIGGELAREQVEAIVNNALDKRDQKWAEVYNITKAQWWGTIHLQ |
| | | INTRLAHTYKALSRQANAIKMNMEFQLANYKGNIDDKAKIKNAISETEILLNKSV |
| | | EQAMKNTEKFMIKLSNSYLTKEMIPKVQDNLKNFDLETKKTLDKFIKEKEDILGT |
| | | NLSSSLRRKVSIRLNKNIAFDINDIPFSEFDDLINQYKNEIEDYEVLNLGAEDGKIK |
| | | DLSGTTSDINIGSDIELADGRENKAIKIKGSENSTIKIAMNKYLRFSATDNFSISFWI |
| | | KHPKPTNLLNNGIEYTLVENFNQRGWKISIQDSKLIWYLRDHNNSIKIVTPDYIAF |
| | | NGWNLITITNNRSKGSIVYVNGSKIEEKDISSIWNTEVDDPIIFRLKNNRDTQAFTL |
| | | LDQFSIYRKELNQNEVVKLYNYYFNSNYIRDIWGNPLQYNKKYYLQTQDKPGKG |
| | | LIREYWSSFGYDYVILSDSKTITFPNNIRYGALYNGSKVLIKNSKKLDGLVRNKDF |
| | | IQLEIDGYNMGISADRFNEDTNYIGTTYGTTHDLTTDFEIIQRQEKYRNYSQLKTP |
| | | YNIFHKSGLMSTETSKPTFHDYRDWVYSSAWYFQNYENLNLRKHTKTNWYFIPK |
| | | DEGWDED |
| 74 | WT | MKLEINKFNYNDPIDGINVITMRPPRHSDKINKGKGPFKAFQVIKNIWIVPERYNF |
| | BoNT/X | TNNTNDLNIPSEPIMEADAIYNPNYLNTPSEKDEFLQGVIKVLERIKSKPEGEKLLE |
| | C467A/C12 | LISSSIPLPLVSNGALTLSDNETIAYQENNNIVSNLQANLVIYGPGPDIANNATYGL |
| | 40A | YSTPISNGEGTLSEVSFSPFYLKPFDESYGNYRSLVNIVNKFVKREFAPDPASTLM |
| | | HELVHVTHNLYGISNRNFYYNFDTGKIETSRQQNSLIFEELLTFGGIDSKAISSLIIK |
| | | KIIETAKNNYTTLISERLNTVTVENDLLKYIKNKIPVQGRLGNFKLDTAEFEKKLN |
| | | TILFVLNESNLAQRFSILVRKHYLKERPIDPIYVNILDDNSYSTLEGFNISSQGSNDF |
| | | QGQLLESSYFEKIESNALRAFIKICPRNGLLYNAIYRNSKNYLNNIDLEDKKTTSK |
| | | TNVSYPCSLLNGAIEVENKDLFLISNKDSLNDINLSEEKIKPETTVFFKDKLPPQDI |
| | | TLSNYDFTEANSIPSISQQNILERNEELYEPIRNSLFEIKTIYVDKLTTFHFLEAQNID |
| | | ESIDSSKIRVELTDSVDEALSNPNKVYSPFKNMSNTINSIETGITSTYIFYQWLRSIV |
| | | KDFSDETGKIDVIDKSSDTLAIVPYIGPLLNIGNDIRHGDFVGAIELAGITALLEYVP |
| | | EFTIPILVGLEVIGGELAREQVEAIVNNALDKRDQKWAEVYNITKAQWWGTIHLQ |
| | | INTRLAHTYKALSRQANAIKMNMEFQLANYKGNIDDKAKIKNAISETEILLNKSV |
| | | EQAMKNTEKFMIKLSNSYLTKEMIPKVQDNLKNFDLETKKTLDKFIKEKEDILGT |
| | | NLSSSLRRKVSIRLNKNIAFDINDIPFSEFDDLINQYKNEIEDYEVLNLGAEDGKIK |
| | | DLSGTTSDINIGSDIELADGRENKAIKIKGSENSTIKIAMNKYLRFSATDNFSISFWI |
| | | KHPKPTNLLNNGIEYTLVENFNQRGWKISIQDSKLIWYLRDHNNSIKIVTPDYIAF |
| | | NGWNLITITNNRSKGSIVYVNGSKIEEKDISSIWNTEVDDPIIFRLKNNRDTQAFTL |
| | | LDQFSIYRKELNQNEVVKLYNYYFNSNYIRDIWGNPLQYNKKYYLQTQDKPGKG |
| | | LIREYWSSFGYDYVILSDSKTITFPNNIRYGALYNGSKVLIKNSKKLDGLVRNKDF |
| | | IQLEIDGYNMGISADRFNEDTNYIGTTYGTTHDLTTDFEIIQRQEKYRNYAQLKTP |
| | | YNIFHKSGLMSTETSKPTFHDYRDWVYSSAWYFQNYENLNLRKHTKTNWYFIPK |
| | | DEGWDED |
| 75 | WT | MKLEINKFNYNDPIDGINVITMRPPRHSDKINKGKGPFKAFQVIKNIWIVPERYNF |
| | BoNT/X | TNNTNDLNIPSEPIMEADAIYNPNYLNTPSEKDEFLQGVIKVLERIKSKPEGEKLLE |
| | LC-H_{N} | LISSSIPLPLVSNGALTLSDNETIAYQENNNIVSNLQANLVIYGPGPDIANNATYGL |
| | C461A | YSTPISNGEGTLSEVSFSPFYLKPFDESYGNYRSLVNIVNKFVKREFAPDPASTLM |
| | | HELVHVTHNLYGISNRNFYYNFDTGKIETSRQQNSLIFEELLTFGGIDSKAISSLIIK |
| | | KIIETAKNNYTTLISERLNTVTVENDLLKYIKNKIPVQGRLGNFKLDTAEFEKKLN |
| | | TILFVLNESNLAQRFSILVRKHYLKERPIDPIYVNILDDNSYSTLEGFNISSQGSNDF |
| | | QGQLLESSYFEKIESNALRAFIKICPRNGLLYNAIYRNSKNYLNNIDLEDKKTTSK |
| | | TNVSYPASLLNGCIEVENKDLFLISNKDSLNDINLSEEKIKPETTVFFKDKLPPQDI |
| | | TLSNYDFTEANSIPSISQQNILERNEELYEPIRNSLFEIKTIYVDKLTTFHFLEAQNID |
| | | ESIDSSKIRVELTDSVDEALSNPNKVYSPFKNMSNTINSIETGITSTYIFYQWLRSIV |
| | | KDFSDETGKIDVIDKSSDTLAIVPYIGPLLNIGNDIRHGDFVGAIELAGITALLEYVP |
| | | EFTIPILVGLEVIGGELAREQVEAIVNNALDKRDQKWAEVYNITKAQWWGTIHLQ |
| | | INTRLAHTYKALSRQANAIKMNMEFQLANYKGNIDDKAKIKNAISETEILLNKSV |
| | | EQAMKNTEKFMIKLSNSYLTKEMIPKVQDNLKNFDLETKKTLDKFIKEKEDILGT |
| | | NLSSSLRRKVSIRLNKNIAFDINDIPFSEFDDLINQYKNEI |
| 76 | WT | MKLEINKFNYNDPIDGINVITMRPPRHSDKINKGKGPFKAFQVIKNIWIVPERYNF |
| | BoNT/X | TNNTNDLNIPSEPIMEADAIYNPNYLNTPSEKDEFLQGVIKVLERIKSKPEGEKLLE |
| | LC-H_{N} | LISSSIPLPLVSNGALTLSDNETIAYQENNNIVSNLQANLVIYGPGPDIANNATYGL |
| | C461S | YSTPISNGEGTLSEVSFSPFYLKPFDESYGNYRSLVNIVNKFVKREFAPDPASTLM |
| | | HELVHVTHNLYGISNRNFYYNFDTGKIETSRQQNSLIFEELLTFGGIDSKAISSLIIK |
| | | KIIETAKNNYTTLISERLNTVTVENDLLKYIKNKIPVQGRLGNFKLDTAEFEKKLN |
| | | TILFVLNESNLAQRFSILVRKHYLKERPIDPIYVNILDDNSYSTLEGFNISSQGSNDF |
| | | QGQLLESSYFEKIESNALRAFIKICPRNGLLYNAIYRNSKNYLNNIDLEDKKTTSK |
| | | TNVSYPSSLLNGCIEVENKDLFLISNKDSLNDINLSEEKIKPETTVFFKDKLPPQDIT |
| | | LSNYDFTEANSIPSISQQNILERNEELYEPIRNSLFEIKTIYVDKLTTFHFLEAQNIDE |
| | | SIDSSKIRVELTDSVDEALSNPNKVYSPFKNMSNTINSIETGITSTYIFYQWLRSIVK |
| | | DFSDETGKIDVIDKSSDTLAIVPYIGPLLNIGNDIRHGDFVGAIELAGITALLEYVPE |
| | | FTIPILVGLEVIGGELAREQVEAIVNNALDKRDQKWAEVYNITKAQWWGTIHLQI |
| | | NTRLAHTYKALSRQANAIKMNMEFQLANYKGNIDDKAKIKNAISETEILLNKSVE |
| | | QAMKNTEKFMIKLSNSYLTKEMIPKVQDNLKNFDLETKKTLDKFIKEKEDILGTN |
| | | LSSSLRRKVSIRLNKNIAFDINDIPFSEFDDLINQYKNEI |
| 77 | WT | MKLEINKFNYNDPIDGINVITMRPPRHSDKINKGKGPFKAFQVIKNIWIVPERYNF |
| | BoNT/X | TNNTNDLNIPSEPIMEADAIYNPNYLNTPSEKDEFLQGVIKVLERIKSKPEGEKLLE |
| | LC-H_{N} | LISSSIPLPLVSNGALTLSDNETIAYQENNNIVSNLQANLVIYGPGPDIANNATYGL |
| | C467A | YSTPISNGEGTLSEVSFSPFYLKPFDESYGNYRSLVNIVNKFVKREFAPDPASTLM |
| | | HELVHVTHNLYGISNRNFYYNFDTGKIETSRQQNSLIFEELLTFGGIDSKAISSLIIK |
| | | KIIETAKNNYTTLISERLNTVTVENDLLKYIKNKIPVQGRLGNFKLDTAEFEKKLN |
| | | TILFVLNESNLAQRFSILVRKHYLKERPIDPIYVNILDDNSYSTLEGFNISSQGSNDF |
| | | QGQLLESSYFEKIESNALRAFIKICPRNGLLYNAIYRNSKNYLNNIDLEDKKTTSK |
| | | TNVSYPCSLLNGAIEVENKDLFLISNKDSLNDINLSEEKIKPETTVFFKDKLPPQDI |
| | | TLSNYDFTEANSIPSISQQNILERNEELYEPIRNSLFEIKTIYVDKLTTFHFLEAQNID |
| | | ESIDSSKIRVELTDSVDEALSNPNKVYSPFKNMSNTINSIETGITSTYIFYQWLRSIV |
| | | KDFSDETGKIDVIDKSSDTLAIVPYIGPLLNIGNDIRHGDFVGAIELAGITALLEYVP |
| | | EFTIPILVGLEVIGGELAREQVEAIVNNALDKRDQKWAEVYNITKAQWWGTIHLQ |
| | | INTRLAHTYKALSRQANAIKMNMEFQLANYKGNIDDKAKIKNAISETEILLNKSV |
| | | EQAMKNTEKFMIKLSNSYLTKEMIPKVQDNLKNFDLETKKTLDKFIKEKEDILGT |
| | | NLSSSLRRKVSIRLNKNIAFDINDIPFSEFDDLINQYKNEI |
| 78 | WT | MKLEINKFNYNDPIDGINVITMRPPRHSDKINKGKGPFKAFQVIKNIWIVPERYNF |
| | BoNT/X | TNNTNDLNIPSEPIMEADAIYNPNYLNTPSEKDEFLQGVIKVLERIKSKPEGEKLLE |
| | LC-H_{N} | LISSSIPLPLVSNGALTLSDNETIAYQENNNIVSNLQANLVIYGPGPDIANNATYGL |
| | C467S | YSTPISNGEGTLSEVSFSPFYLKPFDESYGNYRSLVNIVNKFVKREFAPDPASTLM |
| | | HELVHVTHNLYGISNRNFYYNFDTGKIETSRQQNSLIFEELLTFGGIDSKAISSLIIK |
| | | KIIETAKNNYTTLISERLNTVTVENDLLKYIKNKIPVQGRLGNFKLDTAEFEKKLN |
| | | TILFVLNESNLAQRFSILVRKHYLKERPIDPIYVNILDDNSYSTLEGFNISSQGSNDF |
| | | QGQLLESSYFEKIESNALRAFIKICPRNGLLYNAIYRNSKNYLNNIDLEDKKTTSK |
| | | TNVSYPCSLLNGSIEVENKDLFLISNKDSLNDINLSEEKIKPETTVFFKDKLPPQDIT |
| | | LSNYDFTEANSIPSISQQNILERNEELYEPIRNSLFEIKTIYVDKLTTFHFLEAQNIDE |
| | | SIDSSKIRVELTDSVDEALSNPNKVYSPFKNMSNTINSIETGITSTYIFYQWLRSIVK |
| | | DFSDETGKIDVIDKSSDTLAIVPYIGPLLNIGNDIRHGDFVGAIELAGITALLEYVPE |
| | | FTIPILVGLEVIGGELAREQVEAIVNNALDKRDQKWAEVYNITKAQWWGTIHLQI |
| | | NTRLAHTYKALSRQANAIKMNMEFQLANYKGNIDDKAKIKNAISETEILLNKSVE |
| | | QAMKNTEKFMIKLSNSYLTKEMIPKVQDNLKNFDLETKKTLDKFIKEKEDILGTN |
| | | LSSSLRRKVSIRLNKNIAFDINDIPFSEFDDLINQYKNEI |
| 79 | BoNT/X- | MKLEINKFNYNDPIDGINVITMRPPRHSDKINKGKGPFKAFQVIKNIWIVPERYNF |
| | LC-H_{N}-A1- | TNNTNDLNIPSEPIMEADAIYNPNYLNTPSEKDEFLQGVIKVLERIKSKPEGEKLLE |
| | Hc | LISSSIPLPLVSNGALTLSDNETIAYQENNNIVSNLQANLVIYGPGPDIANNATYGL |
| | | YSTPISNGEGTLSEVSFSPFYLKPFDESYGNYRSLVNIVNKFVKREFAPDPASTLM |
| | | HELVHVTHNLYGISNRNFYYNFDTGKIETSRQQNSLIFEELLTFGGIDSKAISSLIIK |
| | | KIIETAKNNYTTLISERLNTVTVENDLLKYIKNKIPVQGRLGNFKLDTAEFEKKLN |
| | | TILFVLNESNLAQRFSILVRKHYLKERPIDPIYVNILDDNSYSTLEGFNISSQGSNDF |
| | | QGQLLESSYFEKIESNALRAFIKICPRNGLLYNAIYRNSKNYLNNIDLEDKKTTSK |
| | | TNVSYPCSLLNGCIEVENKDLFLISNKDSLNDINLSEEKIKPETTVFFKDKLPPQDIT |
| | | LSNYDFTEANSIPSISQQNILERNEELYEPIRNSLFEIKTIYVDKLTTFHFLEAQNIDE |
| | | SIDSSKIRVELTDSVDEALSNPNKVYSPFKNMSNTINSIETGITSTYIFYQWLRSIVK |
| | | DFSDETGKIDVIDKSSDTLAIVPYIGPLLNIGNDIRHGDFVGAIELAGITALLEYVPE |
| | | FTIPILVGLEVIGGELAREQVEAIVNNALDKRDQKWAEVYNITKAQWWGTIHLQI |
| | | NTRLAHTYKALSRQANAIKMNMEFQLANYKGNIDDKAKIKNAISETEILLNKSVE |
| | | QAMKNTEKFMIKLSNSYLTKEMIPKVQDNLKNFDLETKKTLDKFIKEKEDILGTN |
| | | LSSSLRRKVSIRLNKNIAFDINDIPFSEFDDLINQYKNEIIINTSILNLRYESNHLIDLS |
| | | RYASKINIGSKVNFDPIDKNQIQLFNLESSKIEVILKNAIVYNSMYENFSTSFWIRIP |
| | | KYFNSISLNNEYTIINCMENNSGWKVSLNYGEIIWTLQDTQEIKQRVVFKYSQMI |
| | | NISDYINRWIFVTITNNRLNNSKIYINGRLIDQKPISNLGNIHASNNIMFKLDGCRD |
| | | THRYIWIKYFNLFDKELNEKEIKDLYDNQSNSGILKDFWGDYLQYDKPYYMLNL |
| | | YDPNKYVDVNNVGIRGYMYLKGPRGSVMTTNIYLNSSLYRGTKFIIKKYASGNK |
| | | DNIVRNNDRVYINVVVKNKEYRLATNASQAGVEKILSALEIPDVGNLSQVVVMK |
| | | SKNDQGITNKCKMNLQDNNGNDIGFIGFHQFNNIAKLVASNWYNRQIERSSRTL |
| | | GCSWEFIPVDDGWGERPL |
| 80 | BoNT/X- | MKLEINKFNYNDPIDGINVITMRPPRHSDKINKGKGPFKAFQVIKNIWIVPERYNF |
| | LC-H_{N}-B1- | TNNTNDLNIPSEPIMEADAIYNPNYLNTPSEKDEFLQGVIKVLERIKSKPEGEKLLE |
| | Hc | LISSSIPLPLVSNGALTLSDNETIAYQENNNIVSNLQANLVIYGPGPDIANNATYGL |
| | | YSTPISNGEGTLSEVSFSPFYLKPFDESYGNYRSLVNIVNKFVKREFAPDPASTLM |
| | | HELVHVTHNLYGISNRNFYYNFDTGKIETSRQQNSLIFEELLTFGGIDSKAISSLIIK |
| | | KIIETAKNNYTTLISERLNTVTVENDLLKYIKNKIPVQGRLGNFKLDTAEFEKKLN |
| | | TILFVLNESNLAQRFSILVRKHYLKERPIDPIYVNILDDNSYSTLEGFNISSQGSNDF |
| | | QGQLLESSYFEKIESNALRAFIKICPRNGLLYNAIYRNSKNYLNNIDLEDKKTTSK |
| | | TNVSYPCSLLNGCIEVENKDLFLISNKDSLNDINLSEEKIKPETTVFFKDKLPPQDIT |
| | | LSNYDFTEANSIPSISQQNILERNEELYEPIRNSLFEIKTIYVDKLTTFHFLEAQNIDE |
| | | SIDSSKIRVELTDSVDEALSNPNKVYSPFKNMSNTINSIETGITSTYIFYQWLRSIVK |
| | | DFSDETGKIDVIDKSSDTLAIVPYIGPLLNIGNDIRHGDFVGAIELAGITALLEYVPE |
| | | FTIPILVGLEVIGGELAREQVEAIVNNALDKRDQKWAEVYNITKAQWWGTIHLQI |
| | | NTRLAHTYKALSRQANAIKMNMEFQLANYKGNIDDKAKIKNAISETEILLNKSVE |
| | | QAMKNTEKFMIKLSNSYLTKEMIPKVQDNLKNFDLETKKTLDKFIKEKEDILGTN |
| | | LSSSLRRKVSIRLNKNIAFDINDIPFSEFDDLINQYKNEIILNNIILNLRYKDNNLIDL |
| | | SGYGAKVEVYDGVELNDKNQFKLTSSANSKIRVTQNQNIIFNSVFLDFSVSFWIRI |
| | | PKYKNDGIQNYIHNEYTIINCMKNNSGWKISIRGNRIIWTLIDINGKTKSVFPEYNI |
| | | REDISEYINRWFFVTITNNLNNAKIYINGKLESNTDIKDIREVIANGEIIFKLDGDID |
| | | RTQFIWMKYFSIFNTELSQSNIEERYKIQSYSEYLKDFWGNPLMYNKEYYMFNAG |
| | | NKNSYIKLKKDSPVGEILTRSKYNQNSKYINYRDLYIGEKFIIRRKSNSQSINDDIV |
| | | RKEDYIYLDFFNLNQEWRVYTYKYFKKEEEKLFLAPISDSDEFYNTIQIKEYDEQP |
| | | TYSCQLLFKKDEESTDEIGLIGIHRFYESGIVFEEYKDYFCISKWYLKEVKRKPYN |
| | | LKLGCNWQFIPKDEGWTE |
| 81 | BoNT/X- | MKLEINKFNYNDPIDGINVITMRPPRHSDKINKGKGPFKAFQVIKNIWIVPERYNF |
| | LC-H_{N}-C1- | TNNTNDLNIPSEPIMEADAIYNPNYLNTPSEKDEFLQGVIKVLERIKSKPEGEKLLE |
| | Hc | LISSSIPLPLVSNGALTLSDNETIAYQENNNIVSNLQANLVIYGPGPDIANNATYGL |
| | | YSTPISNGEGTLSEVSFSPFYLKPFDESYGNYRSLVNIVNKFVKREFAPDPASTLM |
| | | HELVHVTHNLYGISNRNFYYNFDTGKIETSRQQNSLIFEELLTFGGIDSKAISSLIIK |
| | | KIIETAKNNYTTLISERLNTVTVENDLLKYIKNKIPVQGRLGNFKLDTAEFEKKLN |
| | | TILFVLNESNLAQRFSILVRKHYLKERPIDPIYVNILDDNSYSTLEGFNISSQGSNDF |
| | | QGQLLESSYFEKIESNALRAFIKICPRNGLLYNAIYRNSKNYLNNIDLEDKKTTSK |
| | | TNVSYPCSLLNGCIEVENKDLFLISNKDSLNDINLSEEKIKPETTVFFKDKLPPQDIT |
| | | LSNYDFTEANSIPSISQQNILERNEELYEPIRNSLFEIKTIYVDKLTTFHFLEAQNIDE |
| | | SIDSSKIRVELTDSVDEALSNPNKVYSPFKNMSNTINSIETGITSTYIFYQWLRSIVK |
| | | DFSDETGKIDVIDKSSDTLAIVPYIGPLLNIGNDIRHGDFVGAIELAGITALLEYVPE |
| | | FTIPILVGLEVIGGELAREQVEAIVNNALDKRDQKWAEVYNITKAQWWGTIHLQI |
| | | NTRLAHTYKALSRQANAIKMNMEFQLANYKGNIDDKAKIKNAISETEILLNKSVE |
| | | QAMKNTEKFMIKLSNSYLTKEMIPKVQDNLKNFDLETKKTLDKFIKEKEDILGTN |
| | | LSSSLRRKVSIRLNKNIAFDINDIPFSEFDDLINQYKNEIINDSKILSLQNRKNTLVD |
| | | TSGYNAEVSEEGDVQLNPIFPFDFKLGSSGEDRGKVIVTQNENIVYNSMYESFSIS |
| | | FWIRINKWVSNLPGYTIIDSVKNNSGWSIGIISNFLVFTLKQNEDSEQSINFSYDISN |
| | | NAPGYNKWFFVTVTNNMMGNMKIYINGKLIDTIKVKELTGINFSKTITFEINKIPD |
| | | TGLITSDSDNINMWIRDFYIFAKELDGKDINILFNSLQYTNVVKDYWGNDLRYNK |
| | | EYYMVNIDYLNRYMYANSRQIVFNTRRNNNDFNEGYKIIIKRIRGNTNDTRVRG |
| | | GDILYFDMTINNKAYNLFMKNETMYADNHSTEDIYAIGLREQTKDINDNIIFQIQP |
| | | MNNTYYYASQIFKSNFNGENISGICSIGTYRFRLGGDWYRHNYLVPTVKQGNYA |
| | | SLLESTSTHWGFVPVSE |
| 82 | BoNT/X- | MKLEINKFNYNDPIDGINVITMRPPRHSDKINKGKGPFKAFQVIKNIWIVPERYNF |
| | LC-H_{N}-A1- | TNNTNDLNIPSEPIMEADAIYNPNYLNTPSEKDEFLQGVIKVLERIKSKPEGEKLLE |
| | Hc C461S | LISSSIPLPLVSNGALTLSDNETIAYQENNNIVSNLQANLVIYGPGPDIANNATYGL |
| | | YSTPISNGEGTLSEVSFSPFYLKPFDESYGNYRSLVNIVNKFVKREFAPDPASTLM |
| | | HELVHVTHNLYGISNRNFYYNFDTGKIETSRQQNSLIFEELLTFGGIDSKAISSLIIK |
| | | KIIETAKNNYTTLISERLNTVTVENDLLKYIKNKIPVQGRLGNFKLDTAEFEKKLN |
| | | TILFVLNESNLAQRFSILVRKHYLKERPIDPIYVNILDDNSYSTLEGFNISSQGSNDF |
| | | QGQLLESSYFEKIESNALRAFIKICPRNGLLYNAIYRNSKNYLNNIDLEDKKTTSK |
| | | TNVSYPSSLLNGCIEVENKDLFLISNKDSLNDINLSEEKIKPETTVFFKDKLPPQDIT |
| | | LSNYDFTEANSIPSISQQNILERNEELYEPIRNSLFEIKTIYVDKLTTFHFLEAQNIDE |
| | | SIDSSKIRVELTDSVDEALSNPNKVYSPFKNMSNTINSIETGITSTYIFYQWLRSIVK |
| | | DFSDETGKIDVIDKSSDTLAIVPYIGPLLNIGNDIRHGDFVGAIELAGITALLEYVPE |
| | | FTIPILVGLEVIGGELAREQVEAIVNNALDKRDQKWAEVYNITKAQWWGTIHLQI |
| | | NTRLAHTYKALSRQANAIKMNMEFQLANYKGNIDDKAKIKNAISETEILLNKSVE |
| | | QAMKNTEKFMIKLSNSYLTKEMIPKVQDNLKNFDLETKKTLDKFIKEKEDILGTN |
| | | LSSSLRRKVSIRLNKNIAFDINDIPFSEFDDLINQYKNEIIINTSILNLRYESNHLIDLS |
| | | RYASKINIGSKVNFDPIDKNQIQLFNLESSKIEVILKNAIVYNSMYENFSTSFWIRIP |
| | | KYFNSISLNNEYTIINCMENNSGWKVSLNYGEIIWTLQDTQEIKQRVVFKYSQMI |
| | | NISDYINRWIFVTITNNRLNNSKIYINGRLIDQKPISNLGNIHASNNIMFKLDGCRD |
| | | THRYIWIKYFNLFDKELNEKEIKDLYDNQSNSGILKDFWGDYLQYDKPYYMLNL |
| | | YDPNKYVDVNNVGIRGYMYLKGPRGSVMTTNIYLNSSLYRGTKFIIKKYASGNK |
| | | DNIVRNNDRVYINVVVKNKEYRLATNASQAGVEKILSALEIPDVGNLSQVVVMK |
| | | SKNDQGITNKCKMNLQDNNGNDIGFIGFHQFNNIAKLVASNWYNRQIERSSRTL |
| | | GCSWEFIPVDDGWGERPL |
| 83 | BoNT/X- | MKLEINKFNYNDPIDGINVITMRPPRHSDKINKGKGPFKAFQVIKNIWIVPERYNF |
| | LC-H_{N}-B1- | TNNTNDLNIPSEPIMEADAIYNPNYLNTPSEKDEFLQGVIKVLERIKSKPEGEKLLE |
| | Hc C461S | LISSSIPLPLVSNGALTLSDNETIAYQENNNIVSNLQANLVIYGPGPDIANNATYGL |
| | | YSTPISNGEGTLSEVSFSPFYLKPFDESYGNYRSLVNIVNKFVKREFAPDPASTLM |
| | | HELVHVTHNLYGISNRNFYYNFDTGKIETSRQQNSLIFEELLTFGGIDSKAISSLIIK |
| | | KIIETAKNNYTTLISERLNTVTVENDLLKYIKNKIPVQGRLGNFKLDTAEFEKKLN |
| | | TILFVLNESNLAQRFSILVRKHYLKERPIDPIYVNILDDNSYSTLEGFNISSQGSNDF |
| | | QGQLLESSYFEKIESNALRAFIKICPRNGLLYNAIYRNSKNYLNNIDLEDKKTTSK |
| | | TNVSYPSSLLNGCIEVENKDLFLISNKDSLNDINLSEEKIKPETTVFFKDKLPPQDIT |
| | | LSNYDFTEANSIPSISQQNILERNEELYEPIRNSLFEIKTIYVDKLTTFHFLEAQNIDE |
| | | SIDSSKIRVELTDSVDEALSNPNKVYSPFKNMSNTINSIETGITSTYIFYQWLRSIVK |
| | | DFSDETGKIDVIDKSSDTLAIVPYIGPLLNIGNDIRHGDFVGAIELAGITALLEYVPE |
| | | FTIPILVGLEVIGGELAREQVEAIVNNALDKRDQKWAEVYNITKAQWWGTIHLQI |
| | | NTRLAHTYKALSRQANAIKMNMEFQLANYKGNIDDKAKIKNAISETEILLNKSVE |
| | | QAMKNTEKFMIKLSNSYLTKEMIPKVQDNLKNFDLETKKTLDKFIKEKEDILGTN |
| | | LSSSLRRKVSIRLNKNIAFDINDIPFSEFDDLINQYKNEIILNNIILNLRYKDNNLIDL |
| | | SGYGAKVEVYDGVELNDKNQFKLTSSANSKIRVTQNQNIIFNSVFLDFSVSFWIRI |
| | | PKYKNDGIQNYIHNEYTIINCMKNNSGWKISIRGNRIIWTLIDINGKTKSVIMEYNI |
| | | REDISEYINRWFFVTITNNLNNAKIYINGKLESNTDIKDIREVIANGEIIFKLDGDID |
| | | RTQFIWMKYFSIFNTELSQSNIEERYKIQSYSEYLKDFWGNPLMYNKEYYMFNAG |
| | | NKNSYIKLKKDSPVGEILTRSKYNQNSKYINYRDLYIGEKFIIRRKSNSQSINDDIV |
| | | RKEDYIYLDFFNLNQEWRVYTYKYFKKEEEKLFLAPISDSDEFYNTIQIKEYDEQP |
| | | TYSCQLLFKKDEESTDEIGLIGIHRFYESGIVFEEYKDYFCISKWYLKEVKRKPYN |
| | | LKLGCNWQFIPKDEGWTE |
| 84 | BoNT/X- | MKLEINKFNYNDPIDGINVITMRPPRHSDKINKGKGPFKAFQVIKNIWIVPERYNFT |
| | LC-H_{N}- | NNTNDLNIPSEPIMEADAIYNPNYLNTPSEKDEFLQGVIKVLERIKSKPEGEKLLEL |
| | C1-Hc | ISSSIPLPLVSNGALTLSDNETIAYQENNNIVSNLQANLVIYGPGPDIANNATYGLY |
| | C461s | STPISNGEGTLSEVSFSPFYLKPFDESYGNYRSLVNIVNKFVKREFAPDPASTLMHE |
| | | LVHVTHNLYGISNRNFYYNFDTGKIETSRQQNSLIFEELLTFGGIDSKAISSLIIKKII |
| | | ETAKNNYTTLISERLNTVTVENDLLKYIKNKIPVQGRLGNFKLDTAEFEKKLNTIL |
| | | FVLNESNLAQRFSILVRKHYLKERPIDPIYVNILDDNSYSTLEGFNISSQGSNDFQG |
| | | QLLESSYFEKIESNALRAFIKICPRNGLLYNAIYRNSKNYLNNIDLEDKKTTSKTNV |
| | | SYPSSLLNGCIEVENKDLFLISNKDSLNDINLSEEKIKPETTVFFKDKLPPQDITLSN |
| | | YDFTEANSIPSISQQNILERNEELYEPIRNSLFEIKTIYVDKLTTFHFLEAQNIDESIDS |
| | | SKIRVELTDSVDEALSNPNKVYSPFKNMSNTINSIETGITSTYIFYQWLRSIVKDFS |
| | | DETGKIDVIDKSSDTLAIVPYIGPLLNIGNDIRHGDFVGAIELAGITALLEYVPEFTIP |
| | | ILVGLEVIGGELAREQVEAIVNNALDKRDQKWAEVYNITKAQWWGTIHLQINTR |
| | | LAHTYKALSRQANAIKMNMEFQLANYKGNIDDKAKIKNAISETEILLNKSVEQA |
| | | MKNTEKFMIKLSNSYLTKEMIPKVQDNLKNFDLETKKTLDKFIKEKEDILGTNLSS |
| | | SLRRKVSIRLNKNIAFDINDIPFSEFDDLINQYKNEIINDSKILSLQNRKNTLVDTSG |
| | | YNAEVSEEGDVQLNPIFPFDFKLGSSGEDRGKVIVTQNENIVYNSMYESFSISFWIR |
| | | INKWVSNLPGYTIIDSVKNNSGWSIGIISNFLVFTLKQNEDSEQSINFSYDISNNAPG |
| | | YNKWFFVTVTNNMMGNMKIYINGKLIDTIKVKELTGINFSKTITFEINKIPDTGLIT |
| | | SDSDNINMWIRDFYIFAKELDGKDINILFNSLQYTNVVKDYWGNDLRYNKEYYM |
| | | VNIDYLNRYMYANSRQIVFNTRRNNNDFNEGYKIIIKRIRGNTNDTRVRGGDILYF |
| | | DMTINNKAYNLFMKNETMYADNHSTEDIYAIGLREQTKDINDNIIFQIQPMNNTY |
| | | YYASQIFKSNFNGENISGICSIGTYRFRLGGDWYRHNYLVPTVKQGNYASLLESTS |
| | | THWGFVPVSE |
| 85 | BoNT/X- | MKLEINKFNYNDPIDGINVITMRPPRHSDKINKGKGPFKAFQVIKNIWIVPERYNFT |
| | LC-H_{N}- | NNTNDLNIPSEPIMEADAIYNPNYLNTPSEKDEFLQGVIKVLERIKSKPEGEKLLEL |
| | A1-Hc | ISSSIPLPLVSNGALTLSDNETIAYQENNNIVSNLQANLVIYGPGPDIANNATYGLY |
| | C467S | STPISNGEGTLSEVSFSPFYLKPFDESYGNYRSLVNIVNKFVKREFAPDPASTLMHE |
| | | LVHVTHNLYGISNRNFYYNFDTGKIETSRQQNSLIFEELLTFGGIDSKAISSLIIKKII |
| | | ETAKNNYTTLISERLNTVTVENDLLKYIKNKIPVQGRLGNFKLDTAEFEKKLNTIL |
| | | FVLNESNLAQRFSILVRKHYLKERPIDPIYVNILDDNSYSTLEGFNISSQGSNDFQG |
| | | QLLESSYFEKIESNALRAFIKICPRNGLLYNAIYRNSKNYLNNIDLEDKKTTSKTNV |
| | | SYPCSLLNGSIEVENKDLFLISNKDSLNDINLSEEKIKPETTVFFKDKLPPQDITLSN |
| | | YDFTEANSIPSISQQNILERNEELYEPIRNSLFEIKTIYVDKLTTFHFLEAQNIDESIDS |
| | | SKIRVELTDSVDEALSNPNKVYSPFKNMSNTINSIETGITSTYIFYQWLRSIVKDFS |
| | | DETGKIDVIDKSSDTLAIVPYIGPLLNIGNDIRHGDFVGAIELAGITALLEYVPEFTIP |
| | | ILVGLEVIGGELAREQVEAIVNNALDKRDQKWAEVYNITKAQWWGTIHLQINTR |
| | | LAHTYKALSRQANAIKMNMEFQLANYKGNIDDKAKIKNAISETEILLNKSVEQA |
| | | MKNTEKFMIKLSNSYLTKEMIPKVQDNLKNFDLETKKTLDKFIKEKEDILGTNLSS |
| | | SLRRKVSIRLNKNIAFDINDIPFSEFDDLINQYKNEIIINTSILNLRYESNHLIDLSRY |
| | | ASKINIGSKVNFDPIDKNQIQLFNLESSKIEVILKNAIVYNSMYENFSTSFWIRIPKY |
| | | FNSISLNNEYTIINCMENNSGWKVSLNYGEIIWTLQDTQEIKQRVVFKYSQMINIS |
| | | DYINRWIFVTITNNRLNNSKIYINGRLIDQKPISNLGNIHASNNIMFKLDGCRDTHR |
| | | YIWIKYFNLFDKELNEKEIKDLYDNQSNSGILKDFWGDYLQYDKPYYMLNLYDP |
| | | NKYVDVNNVGIRGYMYLKGPRGSVMTTNIYLNSSLYRGTKFIIKKYASGNKDNI |
| | | VRNNDRVYINVVVKNKEYRLATNASQAGVEKILSALEIPDVGNLSQVVVMKSKN |
| | | DQGITNKCKMNLQDNNGNDIGFIGFHQFNNIAKLVASNWYNRQIERSSRTLGCS |
| | | WEFIPVDDGWGERPL |
| 86 | BoNT/X- | MKLEINKFNYNDPIDGINVITMRPPRHSDKINKGKGPFKAFQVIKNIWIVPERYNFT |
| | LC-H_{N}- | NNTNDLNIPSEPIMEADAIYNPNYLNTPSEKDEFLQGVIKVLERIKSKPEGEKLLEL |
| | B1-Hc | ISSSIPLPLVSNGALTLSDNETIAYQENNNIVSNLQANLVIYGPGPDIANNATYGLY |
| | C467S | STPISNGEGTLSEVSFSPFYLKPFDESYGNYRSLVNIVNKFVKREFAPDPASTLMHE |
| | | LVHVTHNLYGISNRNFYYNFDTGKIETSRQQNSLIFEELLTFGGIDSKAISSLIIKKII |
| | | ETAKNNYTTLISERLNTVTVENDLLKYIKNKIPVQGRLGNFKLDTAEFEKKLNTIL |
| | | FVLNESNLAQRFSILVRKHYLKERPIDPIYVNILDDNSYSTLEGFNISSQGSNDFQG |
| | | QLLESSYFEKIESNALRAFIKICPRNGLLYNAIYRNSKNYLNNIDLEDKKTTSKTNV |
| | | SYPCSLLNGSIEVENKDLFLISNKDSLNDINLSEEKIKPETTVFFKDKLPPQDITLSN |
| | | YDFTEANSIPSISQQNILERNEELYEPIRNSLFEIKTIYVDKLTTFHFLEAQNIDESIDS |
| | | SKIRVELTDSVDEALSNPNKVYSPFKNMSNTINSIETGITSTYIFYQWLRSIVKDFS |
| | | DETGKIDVIDKSSDTLAIVPYIGPLLNIGNDIRHGDFVGAIELAGITALLEYVPEFTIP |
| | | ILVGLEVIGGELAREQVEAIVNNALDKRDQKWAEVYNITKAQWWGTIHLQINTR |
| | | LAHTYKALSRQANAIKMNMEFQLANYKGNIDDKAKIKNAISETEILLNKSVEQA |
| | | MKNTEKFMIKLSNSYLTKEMIPKVQDNLKNFDLETKKTLDKFIKEKEDILGTNLSS |
| | | SLRRKVSIRLNKNIAFDINDIPFSEFDDLINQYKNEIILNNIILNLRYKDNNLIDLSGY |
| | | GAKVEVYDGVELNDKNQFKLTSSANSKIRVTQNQNIIFNSVFLDFSVSFWIRIPKY |
| | | KNDGIQNYIHNEYTIINCMKNNSGWKISIRGNRIIWTLIDINGKTKSVFFEYNIREDI |
| | | SEYINRWFFVTITNNLNNAKIYINGKLESNTDIKDIREVIANGEIIFKLDGDIDRTQFI |
| | | WMKYFSIFNTELSQSNIEERYKIQSYSEYLKDFWGNPLMYNKEYYMFNAGNKNS |
| | | YIKLKKDSPVGEILTRSKYNQNSKYINYRDLYIGEKFIIRRKSNSQSINDDIVRKED |
| | | YIYLDFFNLNQEWRVYTYKYFKKEEEKLFLAPISDSDEFYNTIQIKEYDEQPTYSC |
| | | QLLFKKDEESTDEIGLIGIHRFYESGIVFEEYKDYFCISKWYLKEVKRKPYNLKLG |
| | | CNWQFIPKDEGWTE |
| 87 | BoNT/X- | MKLEINKFNYNDPIDGINVITMRPPRHSDKINKGKGPFKAFQVIKNIWIVPERYNFT |
| | LC-H_{N}- | NNTNDLNIPSEPIMEADAIYNPNYLNTPSEKDEFLQGVIKVLERIKSKPEGEKLLEL |
| | C1-Hc | ISSSIPLPLVSNGALTLSDNETIAYQENNNIVSNLQANLVIYGPGPDIANNATYGLY |
| | C467S | STPISNGEGTLSEVSFSPFYLKPFDESYGNYRSLVNIVNKFVKREFAPDPASTLMHE |
| | | LVHVTHNLYGISNRNFYYNFDTGKIETSRQQNSLIFEELLTFGGIDSKAISSLIIKKII |
| | | ETAKNNYTTLISERLNTVTVENDLLKYIKNKIPVQGRLGNFKLDTAEFEKKLNTIL |
| | | FVLNESNLAQRFSILVRKHYLKERPIDPIYVNILDDNSYSTLEGFNISSQGSNDFQG |
| | | QLLESSYFEKIESNALRAFIKICPRNGLLYNAIYRNSKNYLNNIDLEDKKTTSKTNV |
| | | SYPCSLLNGSIEVENKDLFLISNKDSLNDINLSEEKIKPETTVFFKDKLPPQDITLSN |
| | | YDFTEANSIPSISQQNILERNEELYEPIRNSLFEIKTIYVDKLTTFHFLEAQNIDESIDS |
| | | SKIRVELTDSVDEALSNPNKVYSPFKNMSNTINSIETGITSTYIFYQWLRSIVKDFS |
| | | DETGKIDVIDKSSDTLAIVPYIGPLLNIGNDIRHGDFVGAIELAGITALLEYVPEFTIP |
| | | ILVGLEVIGGELAREQVEAIVNNALDKRDQKWAEVYNITKAQWWGTIHLQINTR |
| | | LAHTYKALSRQANAIKMNMEFQLANYKGNIDDKAKIKNAISETEILLNKSVEQA |
| | | MKNTEKFMIKLSNSYLTKEMIPKVQDNLKNFDLETKKTLDKFIKEKEDILGTNLSS |
| | | SLRRKVSIRLNKNIAFDINDIPFSEFDDLINQYKNEIINDSKILSLQNRKNTLVDTSG |
| | | YNAEVSEEGDVQLNPIFPFDFKLGSSGEDRGKVIVTQNENIVYNSMYESFSISFWIR |
| | | INKWVSNLPGYTIIDSVKNNSGWSIGIISNFLVFTLKQNEDSEQSINFSYDISNNAPG |
| | | YNKWFFVTVTNNMMGNMKIYINGKLIDTIKVKELTGINFSKTITFEINKIPDTGLIT |
| | | SDSDNINMWIRDFYIFAKELDGKDINILFNSLQYTNVVKDYWGNDLRYNKEYYM |
| | | VNIDYLNRYMYANSRQIVFNTRRNNNDFNEGYKIIIKRIRGNTNDTRVRGGDILYF |
| | | DMTINNKAYNLFMKNETMYADNHSTEDIYAIGLREQTKDINDNIIFQIQPMNNTY |
| | | YYASQIFKSNFNGENISGICSIGTYRFRLGGDWYRHNYLVPTVKQGNYASLLESTS |
| | | THWGFVPVSE |
| 88 | BoNT/X | MKLEINKFNYNDPIDGINVITMRPPRHSDKINKGKGPFKAFQVIKNIWIVPERYNFT |
| | R360A/Y3 | NNTNDLNIPSEPIMEADAIYNPNYLNTPSEKDEFLQGVIKVLERIKSKPEGEKLLEL |
| | 63F | ISSSIPLPLVSNGALTLSDNETIAYQENNNIVSNLQANLVIYGPGPDIANNATYGLY |
| | | STPISNGEGTLSEVSFSPFYLKPFDESYGNYRSLVNIVNKFVKREFAPDPASTLMHE |
| | | LVHVTHNLYGISNRNFYYNFDTGKIETSRQQNSLIFEELLTFGGIDSKAISSLIIKKII |
| | | ETAKNNYTTLISERLNTVTVENDLLKYIKNKIPVQGRLGNFKLDTAEFEKKLNTIL |
| | | FVLNESNLAQRFSILVAKHFLKERPIDPIYVNILDDNSYSTLEGFNISSQGSNDFQG |
| | | QLLESSYFEKIESNALRAFIKICPRNGLLYNAIYRNSKNYLNNIDLEDKKTTSKTNV |
| | | SYPCSLLNGCIEVENKDLFLISNKDSLNDINLSEEKIKPETTVFFKDKLPPQDITLSN |
| | | YDFTEANSIPSISQQNILERNEELYEPIRNSLFEIKTIYVDKLTTFHFLEAQNIDESIDS |
| | | SKIRVELTDSVDEALSNPNKVYSPFKNMSNTINSIETGITSTYIFYQWLRSIVKDFS |
| | | DETGKIDVIDKSSDTLAIVPYIGPLLNIGNDIRHGDFVGAIELAGITALLEYVPEFTIP |
| | | ILVGLEVIGGELAREQVEAIVNNALDKRDQKWAEVYNITKAQWWGTIHLQINTR |
| | | LAHTYKALSRQANAIKMNMEFQLANYKGNIDDKAKIKNAISETEILLNKSVEQA |
| | | MKNTEKFMIKLSNSYLTKEMIPKVQDNLKNFDLETKKTLDKFIKEKEDILGTNLSS |
| | | SLRRKVSIRLNKNIAFDINDIPFSEFDDLINQYKNEIEDYEVLNLGAEDGKIKDLSG |
| | | TTSDINIGSDIELADGRENKAIKIKGSENSTIKIAMNKYLRFSATDNFSISFWIKHPK |
| | | PTNLLNNGIEYTLVENFNQRGWKISIQDSKLIWYLRDHNNSIKIVTPDYIAFNGWN |
| | | LITITNNRSKGSIVYVNGSKIEEKDISSIWNTEVDDPIIFRLKNNRDTQAFTLLDQFSI |
| | | YRKELNQNEVVKLYNYYFNSNYIRDIWGNPLQYNKKYYLQTQDKPGKGLIREY |
| | | WSSFGYDYVILSDSKTITFPNNIRYGALYNGSKVLIKNSKKLDGLVRNKDFIQLEI |
| | | DGYNMGISADRFNEDTNYIGTTYGTTHDLTTDFEIIQRQEKYRNYCQLKTPYNIFH |
| | | KSGLMSTETSKPTFHDYRDWVYSSAWYFQNYENLNLRKHTKTNWYFIPKDEGW |
| | | DED |
| 89 | BoNT/X | MKLEINKFNYNDPIDGINVITMRPPRHSDKINKGKGPFKAFQVIKNIWIVPERYNFT |
| | H227Y | NNTNDLNIPSEPIMEADAIYNPNYLNTPSEKDEFLQGVIKVLERIKSKPEGEKLLEL |
| | | ISSSIPLPLVSNGALTLSDNETIAYQENNNIVSNLQANLVIYGPGPDIANNATYGLY |
| | | STPISNGEGTLSEVSFSPFYLKPFDESYGNYRSLVNIVNKFVKREFAPDPASTLMYE |
| | | LVHVTHNLYGISNRNFYYNFDTGKIETSRQQNSLIFEELLTFGGIDSKAISSLIIKKII |
| | | ETAKNNYTTLISERLNTVTVENDLLKYIKNKIPVQGRLGNFKLDTAEFEKKLNTIL |
| | | FVLNESNLAQRFSILVRKHYLKERPIDPIYVNILDDNSYSTLEGFNISSQGSNDFQG |
| | | QLLESSYFEKIESNALRAFIKICPRNGLLYNAIYRNSKNYLNNIDLEDKKTTSKTNV |
| | | SYPCSLLNGCIEVENKDLFLISNKDSLNDINLSEEKIKPETTVFFKDKLPPQDITLSN |
| | | YDFTEANSIPSISQQNILERNEELYEPIRNSLFEIKTIYVDKLTTFHFLEAQNIDESIDS |
| | | SKIRVELTDSVDEALSNPNKVYSPFKNMSNTINSIETGITSTYIFYQWLRSIVKDFS |
| | | DETGKIDVIDKSSDTLAIVPYIGPLLNIGNDIRHGDFVGAIELAGITALLEYVPEFTIP |
| | | ILVGLEVIGGELAREQVEAIVNNALDKRDQKWAEVYNITKAQWWGTIHLQINTR |
| | | LAHTYKALSRQANAIKMNMEFQLANYKGNIDDKAKIKNAISETEILLNKSVEQA |
| | | MKNTEKFMIKLSNSYLTKEMIPKVQDNLKNFDLETKKTLDKFIKEKEDILGTNLSS |
| | | SLRRKVSIRLNKNIAFDINDIPFSEFDDLINQYKNEIEDYEVLNLGAEDGKIKDLSG |
| | | TTSDINIGSDIELADGRENKAIKIKGSENSTIKIAMNKYLRFSATDNFSISFWIKHPK |
| | | PTNLLNNGIEYTLVENFNQRGWKISIQDSKLIWYLRDHNNSIKIVTPDYIAFNGWN |
| | | LITITNNRSKGSIVYVNGSKIEEKDISSIWNTEVDDPIIFRLKNNRDTQAFTLLDQFSI |
| | | YRKELNQNEVVKLYNYYFNSNYIRDIWGNPLQYNKKYYLQTQDKPGKGLIREY |
| | | WSSFGYDYVILSDSKTITFPNNIRYGALYNGSKVLIKNSKKLDGLVRNKDFIQLEI |
| | | DGYNMGISADRFNEDTNYIGTTYGTTHDLTTDFEIIQRQEKYRNYCQLKTPYNIFH |
| | | KSGLMSTETSKPTFHDYRDWVYSSAWYFQNYENLNLRKHTKTNWYFIPKDEGW |
| | | DED |
| 90 | BoNT/X | MKLEINKFNYNDPIDGINVITMRPPRHSDKINKGKGPFKAFQVIKNIWIVPERYNFT |
| | E228Q | NNTNDLNIPSEPIMEADAIYNPNYLNTPSEKDEFLQGVIKVLERIKSKPEGEKLLEL |
| | | ISSSIPLPLVSNGALTLSDNETIAYQENNNIVSNLQANLVIYGPGPDIANNATYGLY |
| | | STPISNGEGTLSEVSFSPFYLKPFDESYGNYRSLVNIVNKFVKREFAPDPASTLMHQ |
| | | LVHVTHNLYGISNRNFYYNFDTGKIETSRQQNSLIFEELLTFGGIDSKAISSLIIKKII |
| | | ETAKNNYTTLISERLNTVTVENDLLKYIKNKIPVQGRLGNFKLDTAEFEKKLNTIL |
| | | FVLNESNLAQRFSILVRKHYLKERPIDPIYVNILDDNSYSTLEGFNISSQGSNDFQG |
| | | QLLESSYFEKIESNALRAFIKICPRNGLLYNAIYRNSKNYLNNIDLEDKKTTSKTNV |
| | | SYPCSLLNGCIEVENKDLFLISNKDSLNDINLSEEKIKPETTVFFKDKLPPQDITLSN |
| | | YDFTEANSIPSISQQNILERNEELYEPIRNSLFEIKTIYVDKLTTFHFLEAQNIDESIDS |
| | | SKIRVELTDSVDEALSNPNKVYSPFKNMSNTINSIETGITSTYIFYQWLRSIVKDFS |
| | | DETGKIDVIDKSSDTLAIVPYIGPLLNIGNDIRHGDFVGAIELAGITALLEYVPEFTIP |
| | | ILVGLEVIGGELAREQVEAIVNNALDKRDQKWAEVYNITKAQWWGTIHLQINTR |
| | | LAHTYKALSRQANAIKMNMEFQLANYKGNIDDKAKIKNAISETEILLNKSVEQA |
| | | MKNTEKFMIKLSNSYLTKEMIPKVQDNLKNFDLETKKTLDKFIKEKEDILGTNLSS |
| | | SLRRKVSIRLNKNIAFDINDIPFSEFDDLINQYKNEIEDYEVLNLGAEDGKIKDLSG |
| | | TTSDINIGSDIELADGRENKAIKIKGSENSTIKIAMNKYLRFSATDNFSISFWIKHPK |
| | | PTNLLNNGIEYTLVENFNQRGWKISIQDSKLIWYLRDHNNSIKIVTPDYIAFNGWN |
| | | LITITNNRSKGSIVYVNGSKIEEKDISSIWNTEVDDPIIFRLKNNRDTQAFTLLDQFSI |
| | | YRKELNQNEVVKLYNYYFNSNYIRDIWGNPLQYNKKYYLQTQDKPGKGLIREY |
| | | WSSFGYDYVILSDSKTITFPNNIRYGALYNGSKVLIKNSKKLDGLVRNKDFIQLEI |
| | | DGYNMGISADRFNEDTNYIGTTYGTTHDLTTDFEIIQRQEKYRNYCQLKTPYNIFH |
| | | KSGLMSTETSKPTFHDYRDWVYSSAWYFQNYENLNLRKHTKTNWYFIPKDEGW |
| | | DED |
| 91 | BoNT/X | MKLEINKFNYNDPIDGINVITMRPPRHSDKINKGKGPFKAFQVIKNIWIVPERYNFT |
| | H231Y | NNTNDLNIPSEPIMEADAIYNPNYLNTPSEKDEFLQGVIKVLERIKSKPEGEKLLEL |
| | | ISSSIPLPLVSNGALTLSDNETIAYQENNNIVSNLQANLVIYGPGPDIANNATYGLY |
| | | STPISNGEGTLSEVSFSPFYLKPFDESYGNYRSLVNIVNKFVKREFAPDPASTLMHE |
| | | LVYVTHNLYGISNRNFYYNFDTGKIETSRQQNSLIFEELLTFGGIDSKAISSLIIKKII |
| | | ETAKNNYTTLISERLNTVTVENDLLKYIKNKIPVQGRLGNFKLDTAEFEKKLNTIL |
| | | FVLNESNLAQRFSILVRKHYLKERPIDPIYVNILDDNSYSTLEGFNISSQGSNDFQG |
| | | QLLESSYFEKIESNALRAFIKICPRNGLLYNAIYRNSKNYLNNIDLEDKKTTSKTNV |
| | | SYPCSLLNGCIEVENKDLFLISNKDSLNDINLSEEKIKPETTVFFKDKLPPQDITLSN |
| | | YDFTEANSIPSISQQNILERNEELYEPIRNSLFEIKTIYVDKLTTFHFLEAQNIDESIDS |
| | | SKIRVELTDSVDEALSNPNKVYSPFKNMSNTINSIETGITSTYIFYQWLRSIVKDFS |
| | | DETGKIDVIDKSSDTLAIVPYIGPLLNIGNDIRHGDFVGAIELAGITALLEYVPEFTIP |
| | | ILVGLEVIGGELAREQVEAIVNNALDKRDQKWAEVYNITKAQWWGTIHLQINTR |
| | | LAHTYKALSRQANAIKMNMEFQLANYKGNIDDKAKIKNAISETEILLNKSVEQA |
| | | MKNTEKFMIKLSNSYLTKEMIPKVQDNLKNFDLETKKTLDKFIKEKEDILGTNLSS |
| | | SLRRKVSIRLNKNIAFDINDIPFSEFDDLINQYKNEIEDYEVLNLGAEDGKIKDLSG |
| | | TTSDINIGSDIELADGRENKAIKIKGSENSTIKIAMNKYLRFSATDNFSISFWIKHPK |
| | | PTNLLNNGIEYTLVENFNQRGWKISIQDSKLIWYLRDHNNSIKIVTPDYIAFNGWN |
| | | LITITNNRSKGSIVYVNGSKIEEKDISSIWNTEVDDPIIFRLKNNRDTQAFTLLDQFSI |
| | | YRKELNQNEVVKLYNYYFNSNYIRDIWGNPLQYNKKYYLQTQDKPGKGLIREY |
| | | WSSFGYDYVILSDSKTITFPNNIRYGALYNGSKVLIKNSKKLDGLVRNKDFIQLEI |
| | | DGYNMGISADRFNEDTNYIGTTYGTTHDLTTDFEIIQRQEKYRNYCQLKTPYNIFH |
| | | KSGLMSTETSKPTFHDYRDWVYSSAWYFQNYENLNLRKHTKTNWYFIPKDEGW |
| | | DED |
| 92 | BoNT/X- | MKLEINKFNYNDPIDGINVITMRPPRHSDKINKGKGPFKAFQVIKNIWIVPERYNFT |
| | LC-H_{N} | NNTNDLNIPSEPIMEADAIYNPNYLNTPSEKDEFLQGVIKVLERIKSKPEGEKLLEL |
| | R360A/Y3 | ISSSIPLPLVSNGALTLSDNETIAYQENNNIVSNLQANLVIYGPGPDIANNATYGLY |
| | 63F | STPISNGEGTLSEVSFSPFYLKPFDESYGNYRSLVNIVNKFVKREFAPDPASTLMHE |
| | | LVHVTHNLYGISNRNFYYNFDTGKIETSRQQNSLIFEELLTFGGIDSKAISSLIIKKII |
| | | ETAKNNYTTLISERLNTVTVENDLLKYIKNKIPVQGRLGNFKLDTAEFEKKLNTIL |
| | | FVLNESNLAQRFSILVAKHFLKERPIDPIYVNILDDNSYSTLEGFNISSQGSNDFQG |
| | | QLLESSYFEKIESNALRAFIKICPRNGLLYNAIYRNSKNYLNNIDLEDKKTTSKTNV |
| | | SYPCSLLNGCIEVENKDLFLISNKDSLNDINLSEEKIKPETTVFFKDKLPPQDITLSN |
| | | YDFTEANSIPSISQQNILERNEELYEPIRNSLFEIKTIYVDKLTTFHFLEAQNIDESIDS |
| | | SKIRVELTDSVDEALSNPNKVYSPFKNMSNTINSIETGITSTYIFYQWLRSIVKDFS |
| | | DETGKIDVIDKSSDTLAIVPYIGPLLNIGNDIRHGDFVGAIELAGITALLEYVPEFTIP |
| | | ILVGLEVIGGELAREQVEAIVNNALDKRDQKWAEVYNITKAQWWGTIHLQINTR |
| | | LAHTYKALSRQANAIKMNMEFQLANYKGNIDDKAKIKNAISETEILLNKSVEQA |
| | | MKNTEKFMIKLSNSYLTKEMIPKVQDNLKNFDLETKKTLDKFIKEKEDILGTNLSS |
| | | SLRRKVSIRLNKNIAFDINDIPFSEFDDLINQYKNEI |
| 93 | BoNT/X- | MKLEINKFNYNDPIDGINVITMRPPRHSDKINKGKGPFKAFQVIKNIWIVPERYNFT |
| | LC-H_{N} | NNTNDLNIPSEPIMEADAIYNPNYLNTPSEKDEFLQGVIKVLERIKSKPEGEKLLEL |
| | H227Y | ISSSIPLPLVSNGALTLSDNETIAYQENNNIVSNLQANLVIYGPGPDIANNATYGLY |
| | | STPISNGEGTLSEVSFSPFYLKPFDESYGNYRSLVNIVNKFVKREFAPDPASTLMYE |
| | | LVHVTHNLYGISNRNFYYNFDTGKIETSRQQNSLIFEELLTFGGIDSKAISSLIIKKII |
| | | ETAKNNYTTLISERLNTVTVENDLLKYIKNKIPVQGRLGNFKLDTAEFEKKLNTIL |
| | | FVLNESNLAQRFSILVRKHYLKERPIDPIYVNILDDNSYSTLEGFNISSQGSNDFQG |
| | | QLLESSYFEKIESNALRAFIKICPRNGLLYNAIYRNSKNYLNNIDLEDKKTTSKTNV |
| | | SYPCSLLNGCIEVENKDLFLISNKDSLNDINLSEEKIKPETTVFFKDKLPPQDITLSN |
| | | YDFTEANSIPSISQQNILERNEELYEPIRNSLFEIKTIYVDKLTTFHFLEAQNIDESIDS |
| | | SKIRVELTDSVDEALSNPNKVYSPFKNMSNTINSIETGITSTYIFYQWLRSIVKDFS |
| | | DETGKIDVIDKSSDTLAIVPYIGPLLNIGNDIRHGDFVGAIELAGITALLEYVPEFTIP |
| | | ILVGLEVIGGELAREQVEAIVNNALDKRDQKWAEVYNITKAQWWGTIHLQINTR |
| | | LAHTYKALSRQANAIKMNMEFQLANYKGNIDDKAKIKNAISETEILLNKSVEQA |
| | | MKNTEKFMIKLSNSYLTKEMIPKVQDNLKNFDLETKKTLDKFIKEKEDILGTNLSS |
| | | SLRRKVSIRLNKNIAFDINDIPFSEFDDLINQYKNEI |
| 94 | BoNT/X- | MKLEINKFNYNDPIDGINVITMRPPRHSDKINKGKGPFKAFQVIKNIWIVPERYNFT |
| | LC-H_{N} | NNTNDLNIPSEPIMEADAIYNPNYLNTPSEKDEFLQGVIKVLERIKSKPEGEKLLEL |
| | E228Q | ISSSIPLPLVSNGALTLSDNETIAYQENNNIVSNLQANLVIYGPGPDIANNATYGLY |
| | | STPISNGEGTLSEVSFSPFYLKPFDESYGNYRSLVNIVNKFVKREFAPDPASTLMHQ |
| | | LVHVTHNLYGISNRNFYYNFDTGKIETSRQQNSLIFEELLTFGGIDSKAISSLIIKKII |
| | | ETAKNNYTTLISERLNTVTVENDLLKYIKNKIPVQGRLGNFKLDTAEFEKKLNTIL |
| | | FVLNESNLAQRFSILVRKHYLKERPIDPIYVNILDDNSYSTLEGFNISSQGSNDFQG |
| | | QLLESSYFEKIESNALRAFIKICPRNGLLYNAIYRNSKNYLNNIDLEDKKTTSKTNV |
| | | SYPCSLLNGCIEVENKDLFLISNKDSLNDINLSEEKIKPETTVFFKDKLPPQDITLSN |
| | | YDFTEANSIPSISQQNILERNEELYEPIRNSLFEIKTIYVDKLTTFHFLEAQNIDESIDS |
| | | SKIRVELTDSVDEALSNPNKVYSPFKNMSNTINSIETGITSTYIFYQWLRSIVKDFS |
| | | DETGKIDVIDKSSDTLAIVPYIGPLLNIGNDIRHGDFVGAIELAGITALLEYVPEFTIP |
| | | ILVGLEVIGGELAREQVEAIVNNALDKRDQKWAEVYNITKAQWWGTIHLQINTR |
| | | LAHTYKALSRQANAIKMNMEFQLANYKGNIDDKAKIKNAISETEILLNKSVEQA |
| | | MKNTEKFMIKLSNSYLTKEMIPKVQDNLKNFDLETKKTLDKFIKEKEDILGTNLSS |
| | | SLRRKVSIRLNKNIAFDINDIPFSEFDDLINQYKNEI |
| 95 | BoNT/X- | MKLEINKFNYNDPIDGINVITMRPPRHSDKINKGKGPFKAFQVIKNIWIVPERYNFT |
| | LC-H_{N} | NNTNDLNIPSEPIMEADAIYNPNYLNTPSEKDEFLQGVIKVLERIKSKPEGEKLLEL |
| | H231Y | ISSSIPLPLVSNGALTLSDNETIAYQENNNIVSNLQANLVIYGPGPDIANNATYGLY |
| | | STPISNGEGTLSEVSFSPFYLKPFDESYGNYRSLVNIVNKFVKREFAPDPASTLMHE |
| | | LVYVTHNLYGISNRNFYYNFDTGKIETSRQQNSLIFEELLTFGGIDSKAISSLIIKKII |
| | | ETAKNNYTTLISERLNTVTVENDLLKYIKNKIPVQGRLGNFKLDTAEFEKKLNTIL |
| | | FVLNESNLAQRFSILVRKHYLKERPIDPIYVNILDDNSYSTLEGFNISSQGSNDFQG |
| | | QLLESSYFEKIESNALRAFIKICPRNGLLYNAIYRNSKNYLNNIDLEDKKTTSKTNV |
| | | SYPCSLLNGCIEVENKDLFLISNKDSLNDINLSEEKIKPETTVFFKDKLPPQDITLSN |
| | | YDFTEANSIPSISQQNILERNEELYEPIRNSLFEIKTIYVDKLTTFHFLEAQNIDESIDS |
| | | SKIRVELTDSVDEALSNPNKVYSPFKNMSNTINSIETGITSTYIFYQWLRSIVKDFS |
| | | DETGKIDVIDKSSDTLAIVPYIGPLLNIGNDIRHGDFVGAIELAGITALLEYVPEFTIP |
| | | ILVGLEVIGGELAREQVEAIVNNALDKRDQKWAEVYNITKAQWWGTIHLQINTR |
| | | LAHTYKALSRQANAIKMNMEFQLANYKGNIDDKAKIKNAISETEILLNKSVEQA |
| | | MKNTEKFMIKLSNSYLTKEMIPKVQDNLKNFDLETKKTLDKFIKEKEDILGTNLSS |
| | | SLRRKVSIRLNKNIAFDINDIPFSEFDDLINQYKNEI |
| 96 | BoNT/X- | MKLEINKFNYNDPIDGINVITMRPPRHSDKINKGKGPFKAFQVIKNIWIVPERYNFT |
| | LC-H_{N}- | NNTNDLNIPSEPIMEADAIYNPNYLNTPSEKDEFLQGVIKVLERIKSKPEGEKLLEL |
| | LPETGG | ISSSIPLPLVSNGALTLSDNETIAYQENNNIVSNLQANLVIYGPGPDIANNATYGLY |
| | | STPISNGEGTLSEVSFSPFYLKPFDESYGNYRSLVNIVNKFVKREFAPDPASTLMHE |
| | | LVHVTHNLYGISNRNFYYNFDTGKIETSRQQNSLIFEELLTFGGIDSKAISSLIIKKII |
| | | ETAKNNYTTLISERLNTVTVENDLLKYIKNKIPVQGRLGNFKLDTAEFEKKLNTIL |
| | | FVLNESNLAQRFSILVRKHYLKERPIDPIYVNILDDNSYSTLEGFNISSQGSNDFQG |
| | | QLLESSYFEKIESNALRAFIKICPRNGLLYNAIYRNSKNYLNNIDLEDKKTTSKTNV |
| | | SYPCSLLNGCIEVENKDLFLISNKDSLNDINLSEEKIKPETTVFFKDKLPPQDITLSN |
| | | YDFTEANSIPSISQQNILERNEELYEPIRNSLFEIKTIYVDKLTTFHFLEAQNIDESIDS |
| | | SKIRVELTDSVDEALSNPNKVYSPFKNMSNTINSIETGITSTYIFYQWLRSIVKDFS |
| | | DETGKIDVIDKSSDTLAIVPYIGPLLNIGNDIRHGDFVGAIELAGITALLEYVPEFTIP |
| | | ILVGLEVIGGELAREQVEAIVNNALDKRDQKWAEVYNITKAQWWGTIHLQINTR |
| | | LAHTYKALSRQANAIKMNMEFQLANYKGNIDDKAKIKNAISETEILLNKSVEQA |
| | | MKNTEKFMIKLSNSYLTKEMIPKVQDNLKNFDLETKKTLDKFIKEKEDILGTNLSS |
| | | SLRRKVSIRLNKNIAFDINDIPFSEFDDLINQYKNEILPETGG |
| 97 | G- | GEDYEVLNLGAEDGKIKDLSGTTSDINIGSDIELADGRENKAIKIKGSENSTIKIAM |
| | BoNT/X- | NKYLRFSATDNFSISFWIKHPKPTNLLNNGIEYTLVENFNQRGWKISIQDSKLIWY |
| | Hc | LRDHNNSIKIVTPDYIAFNGWNLITITNNRSKGSIVYVNGSKIEEKDISSIWNTEVD |
| | | DPIIFRLKNNRDTQAFTLLDQFSIYRKELNQNEVVKLYNYYFNSNYIRDIWGNPLQ |
| | | YNKKYYLQTQDKPGKGLIREYWSSFGYDYVILSDSKTITFPNNIRYGALYNGSKV |
| | | LIKNSKKLDGLVRNKDFIQLEIDGYNMGISADRFNEDTNYIGTTYGTTHDLTTDFE |
| | | IIQRQEKYRNYCQLKTPYNIFHKSGLMSTETSKPTFHDYRDWVYSSAWYFQNYE |
| | | NLNLRKHTKTNWYFIPKDEGWDED |
| 98 | BoNT/A1- | IINTSILNLRYESNHLIDLSRYASKINIGSKVNFDPIDKNQIQLFNLESSKIEVILKNAI |
| | Hc | VYNSMYENFSTSFWIRIPKYFNSISLNNEYTIINCMENNSGWKVSLNYGEIIWTLQ |
| | | DTQEIKQRVVFKYSQMINISDYINRWIFVTITNNRLNNSKIYINGRLIDQKPISNLGN |
| | | IHASNNIMFKLDGCRDTHRYIWIKYFNLFDKELNEKEIKDLYDNQSNSGILKDFW |
| | | GDYLQYDKPYYMLNLYDPNKYVDVNNVGIRGYMYLKGPRGSVMTTNIYLNSSL |
| | | YRGTKFIIKKYASGNKDNIVRNNDRVYINVVVKNKEYRLATNASQAGVEKILSAL |
| | | EIPDVGNLSQVVVMKSKNDQGITNKCKMNLQDNNGNDIGFIGFHQFNNIAKLVA |
| | | SNWYNRQIERSSRTLGCSWEFIPVDDGWGERPL |
| 99 | BoNT/B1- | ILNNIILNLRYKDNNLIDLSGYGAKVEVYDGVELNDKNQFKLTSSANSKIRVTQN |
| | Hc | QNIIFNSVFLDFSVSFWIRIPKYKNDGIQNYIHNEYTIINCMKNNSGWKISIRGNRII |
| | | WTLIDINGKTKSVFFEYNIREDISEYINRWFFVTITNNLNNAKIYINGKLESNTDIKD |
| | | IREVIANGEIIFKLDGDIDRTQFIWMKYFSIFNTELSQSNIEERYKIQSYSEYLKDFW |
| | | GNPLMYNKEYYMFNAGNKNSYIKLKKDSPVGEILTRSKYNQNSKYINYRDLYIG |
| | | EKFIIRRKSNSQSINDDIVRKEDYIYLDFFNLNQEWRVYTYKYFKKEEEKLFLAPIS |
| | | DSDEFYNTIQIKEYDEQPTYSCQLLFKKDEESTDEIGLIGIHRFYESGIVFEEYKDYF |
| | | CISKWYLKEVKRKPYNLKLGCNWQFIPKDEGWTE |
| 100 | BoNT/C1- | INDSKILSLQNRKNTLVDTSGYNAEVSEEGDVQLNPIFPFDFKLGSSGEDRGKVIV |
| | Hc | TQNENIVYNSMYESFSISFWIRINKWVSNLPGYTIIDSVKNNSGWSIGIISNFLVFTL |
| | | KQNEDSEQSINFSYDISNNAPGYNKWFFVTVTNNMMGNMKIYINGKLIDTIKVKE |
| | | LTGINFSKTITFEINKIPDTGLITSDSDNINMWIRDFYIFAKELDGKDINILFNSLQYT |
| | | NVVKDYWGNDLRYNKEYYMVNIDYLNRYMYANSRQIVFNTRRNNNDFNEGYK |
| | | IIIKRIRGNTNDTRVRGGDILYFDMTINNKAYNLFMKNETMYADNHSTEDIYAIGL |
| | | REQTKDINDNIIFQIQPMNNTYYYASQIFKSNFNGENISGICSIGTYRFRLGGDWYR |
| | | HNYLVPTVKQGNYASLLESTSTHWGFVPVSE |
| 101 | BoNT/EN-LC-H_{N} | MVTINDLHYSDPIDEDNIINMRIPLYDLEVDDQFINHNVPDLKAFQVFPNVWV |
| | with modified linker | VPERYTFYSTMKNLDAPANPSRSSYYDPTYLQSDAEKEVFLQQMILLFKRINS |
| | containing thrombin | TQEGQQFLNLLSRSIPVPYESNGDVAMGTTQVIKQMDDKGNVLKHRRAHIIIY |
| | cleavage site | GPGPDLMAKGSKALTKSRETGRGCMAEIYFSPMYHKTYSTKLTNKNSLVDK |
| | | SVQEFVPDPAVTLIHELCHGLHALYGIDLGNVGSWEFNSNPNSLFSSWFSSKE |
| | | AVNFEEVMTFGGEDVKVIKSEIDKKIPGILNLIKTTVEPIINKITDPHDEMLQCL |
| | | QSKYPSLKGTLGQFFFDDTQLEKDIRDLWMVMNETMFAENLKALTRARYLV |
| | | PKVENIVQVDILSPNVYTIDKGFNHLSKGFKGQSVSQSYFRKISALARGAVVR |
| | | ACPNPHFSSQLVPRGSLSSCIEILEDDLFIMSSKDSFTDTDFSEPSVGPVSYKAK |
| | | KGADTILDSTLSNYDFSKEINFTSTVPIITVEDPLETDEDVPVISEDRTVYVDDY |
| | | TTFHFLEAQKIGKEVVPTQTKVVFTTNMEEALFDSKKVYTVFENTASRINEAG |
| | | TGIANGMMFYQWLKGIVQDFTEEATQKDTFDKISDVTMIVPYLGNILNIGNDI |
| | | RKGDFMGAVELGGVTILLEAIPELTLPVLIGLTIIEDELEKEQVSQTVYNVLDK |
| | | RDEKWEEVYGFVKQQWWWMVHTQFETRILHAYQALNHQVEAIKANMTYQ |
| | | LANYRGNQEDKELLEKAIDDTLQSLYYAVDQAMHNIKRFLIQSSKSYLLNQM |
| | | LPKTKEQLLAFDQQTLRNVNDFINKNQGVLGESLAKDLKKKVEKRLTSLPVF |
| | | NLEDLPISEFEDLIHSHEIDI |
| 102 | BoNT/EN-LC-H_{N} | MVTINDLHYSDPIDEDNIINMRIPLYDLEVDDQFINHNVPDLKAFQVFPNVWV |
| | with BoNT/A linker | VPERYTFYSTMKNLDAPANPSRSSYYDPTYLQSDAEKEVFLQQMILLFKRINS |
| | | TQEGQQFLNLLSRSIPVPYESNGDVAMGTTQVIKQMDDKGNVLKHRRAHIIIY |
| | | GPGPDLMAKGSKALTKSRETGRGCMAEIYFSPMYHKTYSTKLTNKNSLVDK |
| | | SVQEFVPDPAVTLIHELCHGLHALYGIDLGNVGSWEFNSNPNSLFSSWFSSKE |
| | | AVNFEEVMTFGGEDVKVIKSEIDKKIPGILNLIKTTVEPIINKITDPHDEMLQCL |
| | | QSKYPSLKGTLGQFFFDDTQLEKDIRDLWMVMNETMFAENLKALTRARYLV |
| | | PKVENIVQVDILSPNVYTIDKGFNHLSKGFKGQSVSQSYFRKISALARGAVVR |
| | | ACVRGIITSKTKSLDKGYNKALNDLCIEILEDDLFIMSSKDSFTDTDFSEPSVGP |
| | | VSYKAKKGADTILDSTLSNYDFSKEINFTSTVPIITVEDPLETDEDVPVISEDRT |
| | | VYVDDYTTFHFLEAQKIGKEVVPTQTKVVFTTNMEEALFDSKKVYTVFENTA |
| | | SRINEAGTGIANGMMFYQWLKGIVQDFTEEATQKDTFDKISDVTMIVPYLGNI |
| | | LNIGNDIRKGDFMGAVELGGVTILLEAIPELTLPVLIGLTIIEDELEKEQVSQTV |
| | | YNVLDKRDEKWEEVYGFVKQQWWWMVHTQFETRILHAYQALNHQVEAIK |
| | | ANMTYQLANYRGNQEDKELLEKAIDDTLQSLYYAVDQAMHNIKRFLIQSSKS |
| | | YLLNQMLPKTKEQLLAFDQQTLRNVNDFINKNQGVLGESLAKDLKKKVEKR |
| | | LTSLPVFNLEDLPISEFEDLIHSHEIDI |
| 103 | BoNT/EN-LC-H_{N} | MVTINDLHYSDPIDEDNIINMRIPLYDLEVDDQFINHNVPDLKAFQVFPNVWV |
| | with BoNT/B linker | VPERYTFYSTMKNLDAPANPSRSSYYDPTYLQSDAEKEVFLQQMILLFKRINS |
| | | TQEGQQFLNLLSRSIPVPYESNGDVAMGTTQVIKQMDDKGNVLKHRRAHIIIY |
| | | GPGPDLMAKGSKALTKSRETGRGCMAEIYFSPMYHKTYSTKLTNKNSLVDK |
| | | SVQEFVPDPAVTLIHELCHGLHALYGIDLGNVGSWEFNSNPNSLFSSWFSSKE |
| | | AVNFEEVMTFGGEDVKVIKSEIDKKIPGILNLIKTTVEPIINKITDPHDEMLQCL |
| | | QSKYPSLKGTLGQFFFDDTQLEKDIRDLWMVMNETMFAENLKALTRARYLV |
| | | PKVENIVQVDILSPNVYTIDKGFNHLSKGFKGQSVSQSYFRKISALARGAVVR |
| | | ACKSVKAPGICIEILEDDLFIMSSKDSFTDTDFSEPSVGPVSYKAKKGADTILDS |
| | | TLSNYDFSKEINFTSTVPIITVEDPLETDEDVPVISEDRTVYVDDYTTFHFLEAQ |
| | | KIGKEVVPTQTKVVFTTNMEEALFDSKKVYTVFENTASRINEAGTGIANGMM |
| | | FYQWLKGIVQDFTEEATQKDTFDKISDVTMIVPYLGNILNIGNDIRKGDFMGA |
| | | VELGGVTILLEAIPELTLPVLIGLTIIEDELEKEQVSQTVYNVLDKRDEKWEEV |
| | | YGFVKQQWWWMVHTQFETRILHAYQALNHQVEAIKANMTYQLANYRGNQ |
| | | EDKELLEKAIDDTLQSLYYAVDQAMHNIKRFLIQSSKSYLLNQMLPKTKEQL |
| | | LAFDQQTLRNVNDFINKNQGVLGESLAKDLKKKVEKRLTSLPVFNLEDLPISE |
| | | FEDLIHSHEIDI |
| 104 | BoNT/EN-LC-H_{N} | MVTINDLHYSDPIDEDNIINMRIPLYDLEVDDQFINHNVPDLKAFQVFPNVWV |
| | with BoNT/C linker | VPERYTFYSTMKNLDAPANPSRSSYYDPTYLQSDAEKEVFLQQMILLFKRINS |
| | | TQEGQQFLNLLSRSIPVPYESNGDVAMGTTQVIKQMDDKGNVLKHRRAHIIIY |
| | | GPGPDLMAKGSKALTKSRETGRGCMAEIYFSPMYHKTYSTKLTNKNSLVDK |
| | | SVQEFVPDPAVTLIHELCHGLHALYGIDLGNVGSWEFNSNPNSLFSSWFSSKE |
| | | AVNFEEVMTFGGEDVKVIKSEIDKKIPGILNLIKTTVEPIINKITDPHDEMLQCL |
| | | QSKYPSLKGTLGQFFFDDTQLEKDIRDLWMVMNETMFAENLKALTRARYLV |
| | | PKVENIVQVDILSPNVYTIDKGFNHLSKGFKGQSVSQSYFRKISALARGAVVR |
| | | ACHKAIDGRSLYNKTLDCIEILEDDLFIMSSKDSFTDTDFSEPSVGPVSYKAKK |
| | | GADTILDSTLSNYDFSKEINFTSTVPIITVEDPLETDEDVPVISEDRTVYVDDYT |
| | | TFHFLEAQKIGKEVVPTQTKVVFTTNMEEALFDSKKVYTVFENTASRINEAGT |
| | | GIANGMMFYQWLKGIVQDFTEEATQKDTFDKISDVTMIVPYLGNILNIGNDIR |
| | | KGDFMGAVELGGVTILLEAIPELTLPVLIGLTIIEDELEKEQVSQTVYNVLDKR |
| | | DEKWEEVYGFVKQQWWWMVHTQFETRILHAYQALNHQVEAIKANMTYQL |
| | | ANYRGNQEDKELLEKAIDDTLQSLYYAVDQAMHNIKRFLIQSSKSYLLNQML |
| | | PKTKEQLLAFDQQTLRNVNDFINKNQGVLGESLAKDLKKKVEKRLTSLPVFN |
| | | LEDLPISEFEDLIHSHEIDI |
| 105 | BoNT/EN-LC-H_{N} | MVTINDLHYSDPIDEDNIINMRIPLYDLEVDDQFINHNVPDLKAFQVFPNVWV |
| | with BoNT/D linker | VPERYTFYSTMKNLDAPANPSRSSYYDPTYLQSDAEKEVFLQQMILLFKRINS |
| | | TQEGQQFLNLLSRSIPVPYESNGDVAMGTTQVIKQMDDKGNVLKHRRAHIIIY |
| | | GPGPDLMAKGSKALTKSRETGRGCMAEIYFSPMYHKTYSTKLTNKNSLVDK |
| | | SVQEFVPDPAVTLIHELCHGLHALYGIDLGNVGSWEFNSNPNSLFSSWFSSKE |
| | | AVNFEEVMTFGGEDVKVIKSEIDKKIPGILNLIKTTVEPIINKITDPHDEMLQCL |
| | | QSKYPSLKGTLGQFFFDDTQLEKDIRDLWMVMNETMFAENLKALTRARYLV |
| | | PKVENIVQVDILSPNVYTIDKGFNHLSKGFKGQSVSQSYFRKISALARGAVVR |
| | | ACLRLTKNSRDDSTCIEILEDDLFIMSSKDSFTDTDFSEPSVGPVSYKAKKGAD |
| | | TILDSTLSNYDFSKEINFTSTVPIITVEDPLETDEDVPVISEDRTVYVDDYTTFHF |
| | | LEAQKIGKEVVPTQTKVVFTTNMEEALFDSKKVYTVFENTASRINEAGTGIAN |
| | | GMMFYQWLKGIVQDFTEEATQKDTFDKISDVTMIVPYLGNILNIGNDIRKGD |
| | | FMGAVELGGVTILLEAIPELTLPVLIGLTIIEDELEKEQVSQTVYNVLDKRDEK |
| | | WEEVYGFVKQQWWWMVHTQFETRILHAYQALNHQVEAIKANMTYQLANY |
| | | RGNQEDKELLEKAIDDTLQSLYYAVDQAMHNIKRFLIQSSKSYLLNQMLPKT |
| | | KEQLLAFDQQTLRNVNDFINKNQGVLGESLAKDLKKKVEKRLTSLPVFNLED |
| | | LPISEFEDLIHSHEIDI |
| 106 | BoNT/EN-LC-H_{N} | MVTINDLHYSDPIDEDNIINMRIPLYDLEVDDQFINHNVPDLKAFQVFPNVWV |
| | with BoNT/E linker | VPERYTFYSTMKNLDAPANPSRSSYYDPTYLQSDAEKEVFLQQMILLFKRINS |
| | | TQEGQQFLNLLSRSIPVPYESNGDVAMGTTQVIKQMDDKGNVLKHRRAHIIIY |
| | | GPGPDLMAKGSKALTKSRETGRGCMAEIYFSPMYHKTYSTKLTNKNSLVDK |
| | | SVQEFVPDPAVTLIHELCHGLHALYGIDLGNVGSWEFNSNPNSLFSSWFSSKE |
| | | AVNFEEVMTFGGEDVKVIKSEIDKKIPGILNLIKTTVEPIINKITDPHDEMLQCL |
| | | QSKYPSLKGTLGQFFFDDTQLEKDIRDLWMVMNETMFAENLKALTRARYLV |
| | | PKVENIVQVDILSPNVYTIDKGFNHLSKGFKGQSVSQSYFRKISALARGAVVR |
| | | ACKNIVSVKGIRKSICIEILEDDLFIMSSKDSFTDTDFSEPSVGPVSYKAKKGAD |
| | | TILDSTLSNYDFSKEINFTSTVPIITVEDPLETDEDVPVISEDRTVYVDDYTTFHF |
| | | LEAQKIGKEVVPTQTKVVFTTNMEEALFDSKKVYTVFENTASRINEAGTGIAN |
| | | GMMFYQWLKGIVQDFTEEATQKDTFDKISDVTMIVPYLGNILNIGNDIRKGD |
| | | FMGAVELGGVTILLEAIPELTLPVLIGLTIIEDELEKEQVSQTVYNVLDKRDEK |
| | | WEEVYGFVKQQWWWMVHTQFETRILHAYQALNHQVEAIKANMTYQLANY |
| | | RGNQEDKELLEKAIDDTLQSLYYAVDQAMHNIKRFLIQSSKSYLLNQMLPKT |
| | | KEQLLAFDQQTLRNVNDFINKNQGVLGESLAKDLKKKVEKRLTSLPVFNLED |
| | | LPISEFEDLIHSHEIDI |
| 107 | BoNT/EN-LC-H_{N} | MVTINDLHYSDPIDEDNIINMRIPLYDLEVDDQFINHNVPDLKAFQVFPNVWV |
| | with BoNT/F linker | VPERYTFYSTMKNLDAPANPSRSSYYDPTYLQSDAEKEVFLQQMILLFKRINS |
| | | TQEGQQFLNLLSRSIPVPYESNGDVAMGTTQVIKQMDDKGNVLKHRRAHIIIY |
| | | GPGPDLMAKGSKALTKSRETGRGCMAEIYFSPMYHKTYSTKLTNKNSLVDK |
| | | SVQEFVPDPAVTLIHELCHGLHALYGIDLGNVGSWEFNSNPNSLFSSWFSSKE |
| | | AVNFEEVMTFGGEDVKVIKSEIDKKIPGILNLIKTTVEPIINKITDPHDEMLQCL |
| | | QSKYPSLKGTLGQFFFDDTQLEKDIRDLWMVMNETMFAENLKALTRARYLV |
| | | PKVENIVQVDILSPNVYTIDKGFNHLSKGFKGQSVSQSYFRKISALARGAVVR |
| | | ACKSVIPRKGTKAPPRLCIEILEDDLFIMSSKDSFTDTDFSEPSVGPVSYKAKK |
| | | GADTILDSTLSNYDFSKEINFTSTVPIITVEDPLETDEDVPVISEDRTVYVDDYT |
| | | TFHFLEAQKIGKEVVPTQTKVVFTTNMEEALFDSKKVYTVFENTASRINEAGT |
| | | GIANGMMFYQWLKGIVQDFTEEATQKDTFDKISDVTMIVPYLGNILNIGNDIR |
| | | KGDFMGAVELGGVTILLEAIPELTLPVLIGLTIIEDELEKEQVSQTVYNVLDKR |
| | | DEKWEEVYGFVKQQWWWMVHTQFETRILHAYQALNHQVEAIKANMTYQL |
| | | ANYRGNQEDKELLEKAIDDTLQSLYYAVDQAMHNIKRFLIQSSKSYLLNQML |
| | | PKTKEQLLAFDQQTLRNVNDFINKNQGVLGESLAKDLKKKVEKRLTSLPVFN |
| | | LEDLPISEFEDLIHSHEIDI |
| 108 | BoNT/EN-LC-H_{N} | MVTINDLHYSDPIDEDNIINMRIPLYDLEVDDQFINHNVPDLKAFQVFPNVWV |
| | with BoNT/G linker | VPERYTFYSTMKNLDAPANPSRSSYYDPTYLQSDAEKEVFLQQMILLFKRINS |
| | | TQEGQQFLNLLSRSIPVPYESNGDVAMGTTQVIKQMDDKGNVLKHRRAHIIIY |
| | | GPGPDLMAKGSKALTKSRETGRGCMAEIYFSPMYHKTYSTKLTNKNSLVDK |
| | | SVQEFVPDPAVTLIHELCHGLHALYGIDLGNVGSWEFNSNPNSLFSSWFSSKE |
| | | AVNFEEVMTFGGEDVKVIKSEIDKKIPGILNLIKTTVEPIINKITDPHDEMLQCL |
| | | QSKYPSLKGTLGQFFFDDTQLEKDIRDLWMVMNETMFAENLKALTRARYLV |
| | | PKVENIVQVDILSPNVYTIDKGFNHLSKGFKGQSVSQSYFRKISALARGAVVR |
| | | ACKPVMYKNTGKSEQCIEILEDDLFIMSSKDSFTDTDFSEPSVGPVSYKAKKG |
| | | ADTILDSTLSNYDFSKEINFTSTVPIITVEDPLETDEDVPVISEDRTVYVDDYTT |
| | | FHFLEAQKIGKEVVPTQTKVVFTTNMEEALFDSKKVYTVFENTASRINEAGT |
| | | GIANGMMFYQWLKGIVQDFTEEATQKDTFDKISDVTMIVPYLGNILNIGNDIR |
| | | KGDFMGAVELGGVTILLEAIPELTLPVLIGLTIIEDELEKEQVSQTVYNVLDKR |
| | | DEKWEEVYGFVKQQWWWMVHTQFETRILHAYQALNHQVEAIKANMTYQL |
| | | ANYRGNQEDKELLEKAIDDTLQSLYYAVDQAMHNIKRFLIQSSKSYLLNQML |
| | | PKTKEQLLAFDQQTLRNVNDFINKNQGVLGESLAKDLKKKVEKRLTSLPVFN |
| | | LEDLPISEFEDLIHSHEIDI |
| 109 | BoNT/EN-LC-H_{N} | MVTINDLHYSDPIDEDNIINMRIPLYDLEVDDQFINHNVPDLKAFQVFPNVWV |
| | with BoNT/X linker | VPERYTFYSTMKNLDAPANPSRSSYYDPTYLQSDAEKEVFLQQMILLFKRINS |
| | | TQEGQQFLNLLSRSIPVPYESNGDVAMGTTQVIKQMDDKGNVLKHRRAHIIIY |
| | | GPGPDLMAKGSKALTKSRETGRGCMAEIYFSPMYHKTYSTKLTNKNSLVDK |
| | | SVQEFVPDPAVTLIHELCHGLHALYGIDLGNVGSWEFNSNPNSLFSSWFSSKE |
| | | AVNFEEVMTFGGEDVKVIKSEIDKKIPGILNLIKTTVEPIINKITDPHDEMLQCL |
| | | QSKYPSLKGTLGQFFFDDTQLEKDIRDLWMVMNETMFAENLKALTRARYLV |
| | | PKVENIVQVDILSPNVYTIDKGFNHLSKGFKGQSVSQSYFRKISALARGAVVR |
| | | ACPRNGLLYNAIYRNSKNYLNNIDLEDKKTTSKTNVSYPCSLLNGCIEILEDD |
| | | LFIMSSKDSFTDTDFSEPSVGPVSYKAKKGADTILDSTLSNYDFSKEINFTSTVP |
| | | IITVEDPLETDEDVPVISEDRTVYVDDYTTFHFLEAQKIGKEVVPTQTKVVFTT |
| | | NMEEALFDSKKVYTVFENTASRINEAGTGIANGMMFYQWLKGIVQDFTEEA |
| | | TQKDTFDKISDVTMIVPYLGNILNIGNDIRKGDFMGAVELGGVTILLEAIPELT |
| | | LPVLIGLTIIEDELEKEQVSQTVYNVLDKRDEKWEEVYGFVKQQWWWMVHT |
| | | QFETRILHAYQALNHQVEAIKANMTYQLANYRGNQEDKELLEKAIDDTLQSL |
| | | YYAVDQAMHNIKRFLIQSSKSYLLNQMLPKTKEQLLAFDQQTLRNVNDFINK |
| | | NQGVLGESLAKDLKKKVEKRLTSLPVFNLEDLPISEFEDLIHSHEIDI |
| 110 | BoNT/ENfull length | MVTINDLHYSDPIDEDNIINMRIPLYDLEVDDQFINHNVPDLKAFQVFPNVWV |
| | with modified linker | VPERYTFYSTMKNLDAPANPSRSSYYDPTYLQSDAEKEVFLQQMILLFKRINS |
| | containing thrombin | TQEGQQFLNLLSRSIPVPYESNGDVAMGTTQVIKQMDDKGNVLKHRRAHIIIY |
| | cleavage site | GPGPDLMAKGSKALTKSRETGRGCMAEIYFSPMYHKTYSTKLTNKNSLVDK |
| | | SVQEFVPDPAVTLIHELCHGLHALYGIDLGNVGSWEFNSNPNSLFSSWFSSKE |
| | | AVNFEEVMTFGGEDVKVIKSEIDKKIPGILNLIKTTVEPIINKITDPHDEMLQCL |
| | | QSKYPSLKGTLGQFFFDDTQLEKDIRDLWMVMNETMFAENLKALTRARYLV |
| | | PKVENIVQVDILSPNVYTIDKGFNHLSKGFKGQSVSQSYFRKISALARGAVVR |
| | | ACPNPHFSSQLVPRGSLSSCIEILEDDLFIMSSKDSFTDTDFSEPSVGPVSYKAK |
| | | KGADTILDSTLSNYDFSKEINFTSTVPIITVEDPLETDEDVPVISEDRTVYVDDY |
| | | TTFHFLEAQKIGKEVVPTQTKVVFTTNMEEALFDSKKVYTVFENTASRINEAG |
| | | TGIANGMMFYQWLKGIVQDFTEEATQKDTFDKISDVTMIVPYLGNILNIGNDI |
| | | RKGDFMGAVELGGVTILLEAIPELTLPVLIGLTIIEDELEKEQVSQTVYNVLDK |
| | | RDEKWEEVYGFVKQQWWWMVHTQFETRILHAYQALNHQVEAIKANMTYQ |
| | | LANYRGNQEDKELLEKAIDDTLQSLYYAVDQAMHNIKRFLIQSSKSYLLNQM |
| | | LPKTKEQLLAFDQQTLRNVNDFINKNQGVLGESLAKDLKKKVEKRLTSLPVF |
| | | NLEDLPISEFEDLIHSHEIDIQDSEVLNIGVNNGKIQDLSGENTPLTLGENLHIV |
| | | NGRDNQAVRLNNQLDSKLEIQSRPNIHFTAFEDFSISIWIRCSMLRNNRNRGQ |
| | | KYTIIQQFNKYGWQLAIQDSVFVWTLHDTFNNQIQLTSGSALTNKNYLLQNF |
| | | WLHITVTNKRSEKSRLYINGVLQDQKDISVLGNCHPKEPILFSIQDNSDPNYFV |
| | | RPE,QPNVYRKALTDSEVNRLYWKYFEGSYLRDVWGERLTYNRDYYMQLST |
| | | LPGRGIKREYRTWSGFDYIILSELGTQKIPTHEVTYPKLYQGQKITIHSDGKNL |
| | | EPHVKSNKNIRLKIDDFYIGVVNPFKLPEWRPESGAYVVTTYNHAEDLCLYFR |
| | | TRSSSQSLYYGQLIMNDGRNKSLLNYTLKGSTYWIWSSAWYYENYNTSSKT |
| | | AGNWYFIPVDEGWKED |
| 111 | BoNT/EN full length | MVTINDLHYSDPIDEDNIINMRIPLYDLEVDDQFINHNVPDLKAFQVFPNVWV |
| | with BoNT/A linker | VPERYTFYSTMKNLDAPANPSRSSYYDPTYLQSDAEKEVFLQQMILLFKRINS |
| | | TQEGQQFLNLLSRSIPVPYESNGDVAMGTTQVIKQMDDKGNVLKHRRAHIIIY |
| | | GPGPDLMAKGSKALTKSRETGRGCMAEIYFSPMYHKTYSTKLTNKNSLVDK |
| | | SVQEFVPDPAVTLIHELCHGLHALYGIDLGNVGSWEFNSNPNSLFSSWFSSKE |
| | | AVNFEEVMTFGGEDVKVIKSEIDKKIPGILNLIKTTVEPIINKITDPHDEMLQCL |
| | | QSKYPSLKGTLGQFFFDDTQLEKDIRDLWMVMNETMFAENLKALTRARYLV |
| | | PKVENIVQVDILSPNVYTIDKGFNHLSKGFKGQSVSQSYFRKISALARGAVVR |
| | | A |
| | | CVRGIITSKTKSLDKGYNKALNDLCIEILEDDLFIMSSKDSFTDTDFSEPSVGPV |
| | | SYKAKKGADTILDSTLSNYDFSKEINFTSTVPIITVEDPLETDEDVPVISEDRTV |
| | | YVDDYTTFHFLEAQKIGKEVVPTQTKVVFTTNMEEALFDSKKVYTVFENTAS |
| | | RINEAGTGIANGMMFYQWLKGIVQDFTEEATQKDTFDKISDVTMIVPYLGNIL |
| | | NIGNDIRKGDFMGAVELGGVTILLEAIPELTLPVLIGLTIIEDELEKEQVSQTVY |
| | | NVLDKRDEKWEEVYGFVKQQWWWMVHTQFETRILHAYQALNHQVEAIKA |
| | | NMTYQLANYRGNQEDKELLEKAIDDTLQSLYYAVDQAMHNIKRFLIQSSKSY |
| | | LLNQMLPKTKEQLLAFDQQTLRNVNDFINKNQGVLGESLAKDLKKKVEKRL |
| | | TSLPVFNLEDLPISEFEDLIHSHEIDIQDSEVLNIGVNNGKIQDLSGENTPLTLGE |
| | | NLHIVNGRDNQAVRLNNQLDSKLEIQSRPNIHFTAFEDFSISIWIRCSMLRNNR |
| | | NRGQKYTIIQQFNKYGWQLAIQDSVFVWTLHDTFNNQIQLTSGSALTNKNYL |
| | | LQNFWLHITVTNKRSEKSRLYINGVLQDQKDISVLGNCHPKEPILFSIQDNSDP |
| | | NYFVRFEQFNVYRKALTDSEVNRLYWKYFEGSYLRDVWGERLTYNRDYYM |
| | | QLSTLPGRGIKREYRTWSGFDYIILSELGTQKIPTHEVTYPKLYQGQKITIHSDG |
| | | KNLEPHVKSNKNIRLKIDDFYIGVVNPFKLPEWRPESGAYVVTTYNHAEDLC |
| | | LYFRTRSSSQSLYYGQLIMNDGRNKSLLNYTLKGSTYWIWSSAWYYENYNTS |
| | | SKTAGNWYFIPVDEGWKED |
| 112 | BoNT/EN full length | MVTINDLHYSDPIDEDNIINMRIPLYDLEVDDQFINHNVPDLKAFQVFPNVWV |
| | with BoNT/B linker | VPERYTFYSTMKNLDAPANPSRSSYYDPTYLQSDAEKEVFLQQMILLFKRINS |
| | | TQEGQQFLNLLSRSIPVPYESNGDVAMGTTQVIKQMDDKGNVLKHRRAHIIIY |
| | | GPGPDLMAKGSKALTKSRETGRGCMAEIYFSPMYHKTYSTKLTNKNSLVDK |
| | | SVQEFVPDPAVTLIHELCHGLHALYGIDLGNVGSWEFNSNPNSLFSSWFSSKE |
| | | AVNFEEVMTFGGEDVKVIKSEIDKKIPGILNLIKTTVEPIINKITDPHDEMLQCL |
| | | QSKYPSLKGTLGQFFFDDTQLEKDIRDLWMVMNETMFAENLKALTRARYLV |
| | | PKVENIVQVDILSPNVYTIDKGFNHLSKGFKGQSVSQSYFRKISALARGAVVR |
| | | ACKSVKAPGICIEILEDDLFIMSSKDSFTDTDFSEPSVGPVSYKAKKGADTILDS |
| | | TLSNYDFSKEINFTSTVPIITVEDPLETDEDVPVISEDRTVYVDDYTTFHFLEAQ |
| | | KIGKEVVPTQTKVVFTTNMEEALFDSKKVYTVFENTASRINEAGTGIANGMM |
| | | FYQWLKGIVQDFTEEATQKDTFDKISDVTMIVPYLGNILNIGNDIRKGDFMGA |
| | | VELGGVTILLEAIPELTLPVLIGLTIIEDELEKEQVSQTVYNVLDKRDEKWEEV |
| | | YGFVKQQWWWMVHTQFETRILHAYQALNHQVEAIKANMTYQLANYRGNQ |
| | | EDKELLEKAIDDTLQSLYYAVDQAMHNIKRFLIQSSKSYLLNQMLPKTKEQL |
| | | LAFDQQTLRNVNDFINKNQGVLGESLAKDLKKKVEKRLTSLPVFNLEDLPISE |
| | | FEDLIHSHEIDIQDSEVLNIGVNNGKIQDLSGENTPLTLGENLHIVNGRDNQAV |
| | | RLNNQLDSKLEIQSRPNIHFTAFEDFSISIWIRCSMLRNNRNRGQKYTIIQQFNK |
| | | YGWQLAIQDSVFVWTLHDTFNNQIQLTSGSALTNKNYLLQNFWLHITVTNKR |
| | | SEKSRLYINGVLQDQKDISVLGNCHPKEPILFSIQDNSDPNYFVRFEQFNVYRK |
| | | ALTDSEVNRLYWKYFEGSYLRDVWGERLTYNRDYYMQLSTLPGRGIKREYR |
| | | TWSGFDYIILSELGTQKIPTHEVTYPKLYQGQKITIHSDGKNLEPHVKSNKNIR |
| | | LKIDDFYIGVVNPFKLPEWRPESGAYVVTTYNHAEDLCLYFRTRSSSQSLYYG |
| | | QLIMNDGRNKSLLNYTLKGSTYWIWSSAWYYENYNTSSKTAGNWYFIPVDE |
| | | GWKED |
| 113 | BoNT/EN full length | MVTINDLHYSDPIDEDNIINMRIPLYDLEVDDQFINHNVPDLKAFQVFPNVWV |
| | with BoNT/C linker | VPERYTFYSTMKNLDAPANPSRSSYYDPTYLQSDAEKEVFLQQMILLFKRINS |
| | | TQEGQQFLNLLSRSIPVPYESNGDVAMGTTQVIKQMDDKGNVLKHRRAHIIIY |
| | | GPGPDLMAKGSKALTKSRETGRGCMAEIYFSPMYHKTYSTKLTNKNSLVDK |
| | | SVQEFVPDPAVTLIHELCHGLHALYGIDLGNVGSWEFNSNPNSLFSSWFSSKE |
| | | AVNFEEVMTFGGEDVKVIKSEIDKKIPGILNLIKTTVEPIINKITDPHDEMLQCL |
| | | QSKYPSLKGTLGQFFFDDTQLEKDIRDLWMVMNETMFAENLKALTRARYLV |
| | | PKVENIVQVDILSPNVYTIDKGFNHLSKGFKGQSVSQSYFRKISALARGAVVR |
| | | ACHKAIDGRSLYNKTLDCIEILEDDLFIMSSKDSFTDTDFSEPSVGPVSYKAKK |
| | | GADTILDSTLSNYDFSKEINFTSTVPIITVEDPLETDEDVPVISEDRTVYVDDYT |
| | | TFHFLEAQKIGKEVVPTQTKVVFTTNMEEALFDSKKVYTVFENTASRINEAGT |
| | | GIANGMMFYQWLKGIVQDFTEEATQKDTFDKISDVTMIVPYLGNILNIGNDIR |
| | | KGDFMGAVELGGVTILLEAIPELTLPVLIGLTIIEDELEKEQVSQTVYNVLDKR |
| | | DEKWEEVYGFVKQQWWWMVHTQFETRILHAYQALNHQVEAIKANMTYQL |
| | | ANYRGNQEDKELLEKAIDDTLQSLYYAVDQAMHNIKRFLIQSSKSYLLNQML |
| | | PKTKEQLLAFDQQTLRNVNDFINKNQGVLGESLAKDLKKKVEKRLTSLPVFN |
| | | LEDLPISEFEDLIHSHEIDIQDSEVLNIGVNNGKIQDLSGENTPLTLGENLHIVN |
| | | GRDNQAVRLNNQLDSKLEIQSRPNIHFTAFEDFSISIWIRCSMLRNNRNRGQK |
| | | YTIIQQFNKYGWQLAIQDSVFVWTLHDTFNNQIQLTSGSALTNKNYLLQNFW |
| | | LHITVTNKRSEKSRLYINGVLQDQKDISVLGNCHPKEPILFSIQDNSDPNYFVR |
| | | FEQFNVYRKALTDSEVNRLYWKYFEGSYLRDVWGERLTYNRDYYMQLSTLP |
| | | GRGIKREYRTWSGFDYIILSELGTQKIPTHEVTYPKLYQGQKITIHSDGKNLEP |
| | | HVKSNKNIRLKIDDFYIGVVNPFKLPEWRPESGAYVVTTYNHAEDLCLYFRT |
| | | RSSSQSLYYGQLIMNDGRNKSLLNYTLKGSTYWIWSSAWYYENYNTSSKTA |
| | | GNWYFIPVDEGWKED |
| 114 | BoNT/EN full length | MVTINDLHYSDPIDEDNIINMRIPLYDLEVDDQFINHNVPDLKAFQVFPNVWV |
| | with BoNT/D linker | VPERYTFYSTMKNLDAPANPSRSSYYDPTYLQSDAEKEVFLQQMILLFKRINS |
| | | TQEGQQFLNLLSRSIPVPYESNGDVAMGTTQVIKQMDDKGNVLKHRRAHIIIY |
| | | GPGPDLMAKGSKALTKSRETGRGCMAEIYFSPMYHKTYSTKLTNKNSLVDK |
| | | SVQEFVPDPAVTLIHELCHGLHALYGIDLGNVGSWEFNSNPNSLFSSWFSSKE |
| | | AVNFEEVMTFGGEDVKVIKSEIDKKIPGILNLIKTTVEPIINKITDPHDEMLQCL |
| | | QSKYPSLKGTLGQFFFDDTQLEKDIRDLWMVMNETMFAENLKALTRARYLV |
| | | PKVENIVQVDILSPNVYTIDKGFNHLSKGFKGQSVSQSYFRKISALARGAVVR |
| | | ACLRLTKNSRDDSTCIEILEDDLFIMSSKDSFTDTDFSEPSVGPVSYKAKKGAD |
| | | TILDSTLSNYDFSKEINFTSTVPIITVEDPLETDEDVPVISEDRTVYVDDYTTFHF |
| | | LEAQKIGKEVVPTQTKVVFTTNMEEALFDSKKVYTVFENTASRINEAGTGIAN |
| | | GMMFYQWLKGIVQDFTEEATQKDTFDKISDVTMIVPYLGNILNIGNDIRKGD |
| | | FMGAVELGGVTILLEAIPELTLPVLIGLTIIEDELEKEQVSQTVYNVLDKRDEK |
| | | WEEVYGFVKQQWWWMVHTQFETRILHAYQALNHQVEAIKANMTYQLANY |
| | | RGNQEDKELLEKAIDDTLQSLYYAVDQAMHNIKRFLIQSSKSYLLNQMLPKT |
| | | KEQLLAFDQQTLRNVNDFINKNQGVLGESLAKDLKKKVEKRLTSLPVFNLED |
| | | LPISEFEDLIHSHEIDIQDSEVLNIGVNNGKIQDLSGENTPLTLGENLHIVNGRD |
| | | NQAVRLNNQLDSKLEIQSRPNIHFTAFEDFSISIWIRCSMLRNNRNRGQKYTII |
| | | QQFNKYGWQLAIQDSVFVWTLHDTFNNQIQLTSGSALTNKNYLLQNFWLHIT |
| | | VTNKRSEKSRLYINGVLQDQKDISVLGNCHPKEPILFSIQDNSDPNYFVRFEQF |
| | | NVYRKALTDSEVNRLYWKYFEGSYLRDVWGERLTYNRDYYMQLSTLPGRGI |
| | | KREYRTWSGFDYIILSELGTQKIPTHEVTYPKLYQGQKITIHSDGKNLEPHVKS |
| | | NKNIRLKIDDFYIGVVNPFKLPEWRPESGAYVVTTYNHAEDLCLYFRTRSSSQ |
| | | SLYYGQLIMNDGRNKSLLNYTLKGSTYWIWSSAWYYENYNTSSKTAGNWY |
| | | FIPVDEGWKED |
| 115 | BoNT/EN full length | MVTINDLHYSDPIDEDNIINMRIPLYDLEVDDQFINHNVPDLKAFQVFPNVWV |
| | with BoNT/E linker | VPERYTFYSTMKNLDAPANPSRSSYYDPTYLQSDAEKEVFLQQMILLFKRINS |
| | | TQEGQQFLNLLSRSIPVPYESNGDVAMGTTQVIKQMDDKGNVLKHRRAHIIIY |
| | | GPGPDLMAKGSKALTKSRETGRGCMAEIYFSPMYHKTYSTKLTNKNSLVDK |
| | | SVQEFVPDPAVTLIHELCHGLHALYGIDLGNVGSWEFNSNPNSLFSSWFSSKE |
| | | AVNFEEVMTFGGEDVKVIKSEIDKKIPGILNLIKTTVEPIINKITDPHDEMLQCL |
| | | QSKYPSLKGTLGQFFFDDTQLEKDIRDLWMVMNETMFAENLKALTRARYLV |
| | | PKVENIVQVDILSPNVYTIDKGFNHLSKGFKGQSVSQSYFRKISALARGAVVR |
| | | ACKNIVSVKGIRKSICIEILEDDLFIMSSKDSFTDTDFSEPSVGPVSYKAKKGAD |
| | | TILDSTLSNYDFSKEINFTSTVPIITVEDPLETDEDVPVISEDRTVYVDDYTTFHF |
| | | LEAQKIGKEVVPTQTKVVFTTNMEEALFDSKKVYTVFENTASRINEAGTGIAN |
| | | GMMFYQWLKGIVQDFTEEATQKDTFDKISDVTMIVPYLGNILNIGNDIRKGD |
| | | FMGAVELGGVTILLEAIPELTLPVLIGLTIIEDELEKEQVSQTVYNVLDKRDEK |
| | | WEEVYGFVKQQWWWMVHTQFETRILHAYQALNHQVEAIKANMTYQLANY |
| | | RGNQEDKELLEKAIDDTLQSLYYAVDQAMHNIKRFLIQSSKSYLLNQMLPKT |
| | | KEQLLAFDQQTLRNVNDFINKNQGVLGESLAKDLKKKVEKRLTSLPVFNLED |
| | | LPISEFEDLIHSHEIDIQDSEVLNIGVNNGKIQDLSGENTPLTLGENLHIVNGRD |
| | | NQAVRLNNQLDSKLEIQSRPNIHFTAFEDFSISIWIRCSMLRNNRNRGQKYTII |
| | | QQFNKYGWQLAIQDSVFVWTLHDTFNNQIQLTSGSALTNKNYLLQNFWLHIT |
| | | VTNKRSEKSRLYINGVLQDQKDISVLGNCHPKEPILFSIQDNSDPNYFVRFEQF |
| | | NVYRKALTDSEVNRLYWKYFEGSYLRDVWGERLTYNRDYYMQLSTLPGRGI |
| | | KREYRTWSGFDYIILSELGTQKIPTHEVTYPKLYQGQKITIHSDGKNLEPHVKS |
| | | NKNIRLKIDDFYIGVVNPFKLPEWRPESGAYVVTTYNHAEDLCLYFRTRSSSQ |
| | | SLYYGQLIMNDGRNKSLLNYTLKGSTYWIWSSAWYYENYNTSSKTAGNWY |
| | | FIPVDEGWKED |
| 116 | BoNT/EN full length | MVTINDLHYSDPIDEDNIINMRIPLYDLEVDDQFINHNVPDLKAFQVFPNVWV |
| | with BoNT/F linker | VPERYTFYSTMKNLDAPANPSRSSYYDPTYLQSDAEKEVFLQQMILLFKRINS |
| | | TQEGQQFLNLLSRSIPVPYESNGDVAMGTTQVIKQMDDKGNVLKHRRAHIIIY |
| | | GPGPDLMAKGSKALTKSRETGRGCMAEIYFSPMYHKTYSTKLTNKNSLVDK |
| | | SVQEFVPDPAVTLIHELCHGLHALYGIDLGNVGSWEFNSNPNSLFSSWFSSKE |
| | | AVNFEEVMTFGGEDVKVIKSEIDKKIPGILNLIKTTVEPIINKITDPHDEMLQCL |
| | | QSKYPSLKGTLGQFFFDDTQLEKDIRDLWMVMNETMFAENLKALTRARYLV |
| | | PKVENIVQVDILSPNVYTIDKGFNHLSKGFKGQSVSQSYFRKISALARGAVVR |
| | | ACKSVIPRKGTKAPPRLCIEILEDDLFIMSSKDSFTDTDFSEPSVGPVSYKAKK |
| | | GADTILDSTLSNYDFSKEINFTSTVPIITVEDPLETDEDVPVISEDRTVYVDDYT |
| | | TFHFLEAQKIGKEVVPTQTKVVFTTNMEEALFDSKKVYTVFENTASRINEAGT |
| | | GIANGMMFYQWLKGIVQDFTEEATQKDTFDKISDVTMIVPYLGNILNIGNDIR |
| | | KGDFMGAVELGGVTILLEAIPELTLPVLIGLTIIEDELEKEQVSQTVYNVLDKR |
| | | DEKWEEVYGFVKQQWWWMVHTQFETRILHAYQALNHQVEAIKANMTYQL |
| | | ANYRGNQEDKELLEKAIDDTLQSLYYAVDQAMHNIKRFLIQSSKSYLLNQML |
| | | PKTKEQLLAFDQQTLRNVNDFINKNQGVLGESLAKDLKKKVEKRLTSLPVFN |
| | | LEDLPISEFEDLIHSHEIDIQDSEVLNIGVNNGKIQDLSGENTPLTLGENLHIVN |
| | | GRDNQAVRLNNQLDSKLEIQSRPNIHFTAFEDFSISIWIRCSMLRNNRNRGQK |
| | | YTIIQQFNKYGWQLAIQDSVFVWTLHDTFNNQIQLTSGSALTNKNYLLQNFW |
| | | LHITVTNKRSEKSRLYINGVLQDQKDISVLGNCHPKEPILFSIQDNSDPNYFVR |
| | | FEQFNVYRKALTDSEVNRLYWKYFEGSYLRDVWGERLTYNRDYYMQLSTLP |
| | | GRGIKREYRTWSGFDYIILSELGTQKIPTHEVTYPKLYQGQKITIHSDGKNLEP |
| | | HVKSNKNIRLKIDDFYIGVVNPFKLPEWRPESGAYVVTTYNHAEDLCLYFRT |
| | | RSSSQSLYYGQLIMNDGRNKSLLNYTLKGSTYWIWSSAWYYENYNTSSKTA |
| | | GNWYFIPVDEGWKED |
| 117 | BoNT/EN full length | MVTINDLHYSDPIDEDNIINMRIPLYDLEVDDQFINHNVPDLKAFQVFPNVWV |
| | with BoNT/G linker | VPERYTFYSTMKNLDAPANPSRSSYYDPTYLQSDAEKEVFLQQMILLFKRINS |
| | | TQEGQQFLNLLSRSIPVPYESNGDVAMGTTQVIKQMDDKGNVLKHRRAHIIIY |
| | | GPGPDLMAKGSKALTKSRETGRGCMAEIYFSPMYHKTYSTKLTNKNSLVDK |
| | | SVQEFVPDPAVTLIHELCHGLHALYGIDLGNVGSWEFNSNPNSLFSSWFSSKE |
| | | AVNFEEVMTFGGEDVKVIKSEIDKKIPGILNLIKTTVEPIINKITDPHDEMLQCL |
| | | QSKYPSLKGTLGQFFFDDTQLEKDIRDLWMVMNETMFAENLKALTRARYLV |
| | | PKVENIVQVDILSPNVYTIDKGFNHLSKGFKGQSVSQSYFRKISALARGAVVR |
| | | ACKPVMYKNTGKSEQCIEILEDDLFIMSSKDSFTDTDFSEPSVGPVSYKAKKG |
| | | ADTILDSTLSNYDFSKEINFTSTVPIITVEDPLETDEDVPVISEDRTVYVDDYTT |
| | | FHFLEAQKIGKEVVPTQTKVVFTTNMEEALFDSKKVYTVFENTASRINEAGT |
| | | GIANGMMFYQWLKGIVQDFTEEATQKDTFDKISDVTMIVPYLGNILNIGNDIR |
| | | KGDFMGAVELGGVTILLEAIPELTLPVLIGLTIIEDELEKEQVSQTVYNVLDKR |
| | | DEKWEEVYGFVKQQWWWMVHTQFETRILHAYQALNHQVEAIKANMTYQL |
| | | ANYRGNQEDKELLEKAIDDTLQSLYYAVDQAMHNIKRFLIQSSKSYLLNQML |
| | | PKTKEQLLAFDQQTLRNVNDFINKNQGVLGESLAKDLKKKVEKRLTSLPVFN |
| | | LEDLPISEFEDLIHSHEIDIQDSEVLNIGVNNGKIQDLSGENTPLTLGENLHIVN |
| | | GRDNQAVRLNNQLDSKLEIQSRPNIHFTAFEDFSISIWIRCSMLRNNRNRGQK |
| | | YTIIQQFNKYGWQLAIQDSVFVWTLHDTFNNQIQLTSGSALTNKNYLLQNFW |
| | | LHITVTNKRSEKSRLYINGVLQDQKDISVLGNCHPKEPILFSIQDNSDPNYFVR |
| | | FEQFNVYRKALTDSEVNRLYWKYFEGSYLRDVWGERLTYNRDYYMQLSTLP |
| | | GRGIKREYRTWSGFDYIILSELGTQKIPTHEVTYPKLYQGQKITIHSDGKNLEP |
| | | HVKSNKNIRLKIDDFYIGVVNPFKLPEWRPESGAYVVTTYNHAEDLCLYFRT |
| | | RSSSQSLYYGQLIMNDGRNKSLLNYTLKGSTYWIWSSAWYYENYNTSSKTA |
| | | GNWYFIPVDEGWKED |
| 118 | BoNT/EN full length | MVTINDLHYSDPIDEDNIINMRIPLYDLEVDDQFINHNVPDLKAFQVFPNVWV |
| | with BoNT/X linker | VPERYTFYSTMKNLDAPANPSRSSYYDPTYLQSDAEKEVFLQQMILLFKRINS |
| | | TQEGQQFLNLLSRSIPVPYESNGDVAMGTTQVIKQMDDKGNVLKHRRAHIIIY |
| | | GPGPDLMAKGSKALTKSRETGRGCMAEIYFSPMYHKTYSTKLTNKNSLVDK |
| | | SVQEFVPDPAVTLIHELCHGLHALYGIDLGNVGSWEFNSNPNSLFSSWFSSKE |
| | | AVNFEEVMTFGGEDVKVIKSEIDKKIPGILNLIKTTVEPIINKITDPHDEMLQCL |
| | | QSKYPSLKGTLGQFFFDDTQLEKDIRDLWMVMNETMFAENLKALTRARYLV |
| | | PKVENIVQVDILSPNVYTIDKGFNHLSKGFKGQSVSQSYFRKISALARGAVVR |
| | | ACPRNGLLYNAIYRNSKNYLNNIDLEDKKTTSKTNVSYPCSLLNGCIEILEDD |
| | | LFIMSSKDSFTDTDFSEPSVGPVSYKAKKGADTILDSTLSNYDFSKEINFTSTVP |
| | | IITVEDPLETDEDVPVISEDRTVYVDDYTTFHFLEAQKIGKEVVPTQTKVVFTT |
| | | NMEEALFDSKKVYTVFENTASRINEAGTGIANGMMFYQWLKGIVQDFTEEA |
| | | TQKDTFDKISDVTMIVPYLGNILNIGNDIRKGDFMGAVELGGVTILLEAIPELT |
| | | LPVLIGLTIIEDELEKEQVSQTVYNVLDKRDEKWEEVYGFVKQQWWWMVHT |
| | | QFETRILHAYQALNHQVEAIKANMTYQLANYRGNQEDKELLEKAIDDTLQSL |
| | | YYAVDQAMHNIKRFLIQSSKSYLLNQMLPKTKEQLLAFDQQTLRNVNDFINK |
| | | NQGVLGESLAKDLKKKVEKRLTSLPVFNLEDLPISEFEDLIHSHEIDIQDSEVL |
| | | NIGVNNGKIQDLSGENTPLTLGENLHIVNGRDNQAVRLNNQLDSKLEIQSRPN |
| | | IHFTAFEDFSISIWIRCSMLRNNRNRGQKYTIIQQFNKYGWQLAIQDSVFVWTL |
| | | HDTFNNQIQLTSGSALTNKNYLLQNFWLHITVTNKRSEKSRLYINGVLQDQK |
| | | DISVLGNCHPKEPILFSIQDNSDPNYFVRFEQFNVYRKALTDSEVNRLYWKYF |
| | | EGSYLRDVWGERLTYNRDYYMQLSTLPGRGIKREYRTWSGFDYIILSELGTQ |
| | | KIPTHEVTYPKLYQGQKITIHSDGKNLEPHVKSNKNIRLKIDDFYIGVVNPFKL |
| | | PEWRPESGAYVVTTYNHAEDLCLYFRTRSSSQSLYYGQLIMNDGRNKSLLNY |
| | | TLKGSTYWIWSSAWYYENYNTSSKTAGNWYFIPVDEGWKED |
| 119 | BoNT/EN-LC-H_{N} | MVTINDLHYSDPIDEDNIINMRIPLYDLEVDDQFINHNVPDLKAFQVFPNVWV |
| | and BoNT/A1-H_{C} | VPERYTFYSTMKNLDAPANPSRSSYYDPTYLQSDAEKEVFLQQMILLFKRINS |
| | | TQEGQQFLNLLSRSIPVPYESNGDVAMGTTQVIKQMDDKGNVLKHRRAHIIIY |
| | | GPGPDLMAKGSKALTKSRETGRGCMAEIYFSPMYHKTYSTKLTNKNSLVDK |
| | | SVQEFVPDPAVTLIHELCHGLHALYGIDLGNVGSWEFNSNPNSLFSSWFSSKE |
| | | AVNFEEVMTFGGEDVKVIKSEIDKKIPGILNLIKTTVEPIINKITDPHDEMLQCL |
| | | QSKYPSLKGTLGQFFFDDTQLEKDIRDLWMVMNETMFAENLKALTRARYLV |
| | | PKVENIVQVDILSPNVYTIDKGFNHLSKGFKGQSVSQSYFRKISALARGAVVR |
| | | ACPNPHFSSQRGLSSCIEILEDDLFIMSSKDSFTDTDFSEPSVGPVSYKAKKGA |
| | | DTILDSTLSNYDFSKEINFTSTVPIITVEDPLETDEDVPVISEDRTVYVDDYTTF |
| | | HFLEAQKIGKEVVPTQTKVVFTTNMEEALFDSKKVYTVFENTASRINEAGTGI |
| | | ANGMMFYQWLKGIVQDFTEEATQKDTFDKISDVTMIVPYLGNILNIGNDIRK |
| | | GDFMGAVELGGVTILLEAIPELTLPVLIGLTIIEDELEKEQVSQTVYNVLDKRD |
| | | EKWEEVYGFVKQQWWWMVHTQFETRILHAYQALNHQVEAIKANMTYQLA |
| | | NYRGNQEDKELLEKAIDDTLQSLYYAVDQAMHNIKRFLIQSSKSYLLNQMLP |
| | | KTKEQLLAFDQQTLRNVNDFINKNQGVLGESLAKDLKKKVEKRLTSLPVFNL |
| | | EDLPISEFEDLIHSHEIDIIINTSILNLRYESNHLIDLSRYASKINIGSKVNFDPIDK |
| | | NQIQLFNLESSKIEVILKNAIVYNSMYENFSTSFWIRIPKYFNSISLNNEYTIINC |
| | | MENNSGWKVSLNYGEIIWTLQDTQEIKQRVVFKYSQMINISDYINRWIFVTIT |
| | | NNRLNNSKIYINGRLIDQKPISNLGNIHASNNIMFKLDGCRDTHRYIWIKYFNL |
| | | FDKELNEKEIKDLYDNQSNSGILKDFWGDYLQYDKPYYMLNLYDPNKYVDV |
| | | NNVGIRGYMYLKGPRGSVMTTNIYLNSSLYRGTKFIIKKYASGNKDNIVRNN |
| | | DRVYINVVVKNKEYRLATNASQAGVEKILSALEIPDVGNLSQVVVMKSKND |
| | | QGITNKCKMNLQDNNGNDIGFIGFHQFNNIAKLVASNWYNRQIERSSRTLGC |
| | | SWEFIPVDDGWGERPL |
| 120 | BoNT/EN-LC-H_{N} | MVTINDLHYSDPIDEDNIINMRIPLYDLEVDDQFINHNVPDLKAFQVFPNVWV |
| | and BoNT/B1-H_{C} | VPERYTFYSTMKNLDAPANPSRSSYYDPTYLQSDAEKEVFLQQMILLFKRINS |
| | | TQEGQQFLNLLSRSIPVPYESNGDVAMGTTQVIKQMDDKGNVLKHRRAHIIIY |
| | | GPGPDLMAKGSKALTKSRETGRGCMAEIYFSPMYHKTYSTKLTNKNSLVDK |
| | | SVQEFVPDPAVTLIHELCHGLHALYGIDLGNVGSWEFNSNPNSLFSSWFSSKE |
| | | AVNFEEVMTFGGEDVKVIKSEIDKKIPGILNLIKTTVEPIINKITDPHDEMLQCL |
| | | QSKYPSLKGTLGQFFFDDTQLEKDIRDLWMVMNETMFAENLKALTRARYLV |
| | | PKVENIVQVDILSPNVYTIDKGFNHLSKGFKGQSVSQSYFRKISALARGAVVR |
| | | ACPNPHFSSQRGLSSCIEILEDDLFIMSSKDSFTDTDFSEPSVGPVSYKAKKGA |
| | | DTILDSTLSNYDFSKEINFTSTVPIITVEDPLETDEDVPVISEDRTVYVDDYTTF |
| | | HFLEAQKIGKEVVPTQTKVVFTTNMEEALFDSKKVYTVFENTASRINEAGTGI |
| | | ANGMMFYQWLKGIVQDFTEEATQKDTFDKISDVTMIVPYLGNILNIGNDIRK |
| | | GDFMGAVELGGVTILLEAIPELTLPVLIGLTIIEDELEKEQVSQTVYNVLDKRD |
| | | EKWEEVYGFVKQQWWWMVHTQFETRILHAYQALNHQVEAIKANMTYQLA |
| | | NYRGNQEDKELLEKAIDDTLQSLYYAVDQAMHNIKRFLIQSSKSYLLNQMLP |
| | | KTKEQLLAFDQQTLRNVNDFINKNQGVLGESLAKDLKKKVEKRLTSLPVFNL |
| | | EDLPISEFEDLIHSHEIDIILNNIILNLRYKDNNLIDLSGYGAKVEVYDGVELND |
| | | KNQFKLTSSANSKIRVTQNQNIIFNSVFLDFSVSFWIRIPKYKNDGIQNYIHNEY |
| | | TIINCMKNNSGWKISIRGNRIIWTLIDINGKTKSVFFEYNIREDISEYINRWFFVT |
| | | ITNNLNNAKIYINGKLESNTDIKDIREVIANGEIIFKLDGDIDRTQFIWMKYFSIF |
| | | NTELSQSNIEERYKIQSYSEYLKDFWGNPLMYNKEYYMFNAGNKNSYIKLKK |
| | | DSPVGEILTRSKYNQNSKYINYRDLYIGEKFIIRRKSNSQSINDDIVRKEDYIYL |
| | | DFFNLNQEWRVYTYKYFKKEEEKLFLAPISDSDEFYNTIQIKEYDEQPTYSCQ |
| | | LLFKKDEESTDEIGLIGIHRFYESGIVFEEYKDYFCISKWYLKEVKRKPYNLKL |
| | | GCNWQFIPKDEGWTE |
| 121 | BoNT/EN-LC-H_{N} | MVTINDLHYSDPIDEDNIINMRIPLYDLEVDDQFINHNVPDLKAFQVFPNVWV |
| | and BoNT/C1-H_{C} | VPERYTFYSTMKNLDAPANPSRSSYYDPTYLQSDAEKEVFLQQMILLFKRINS |
| | | TQEGQQFLNLLSRSIPVPYESNGDVAMGTTQVIKQMDDKGNVLKHRRAHIIIY |
| | | GPGPDLMAKGSKALTKSRETGRGCMAEIYFSPMYHKTYSTKLTNKNSLVDK |
| | | SVQEFVPDPAVTLIHELCHGLHALYGIDLGNVGSWEFNSNPNSLFSSWFSSKE |
| | | AVNFEEVMTFGGEDVKVIKSEIDKKIPGILNLIKTTVEPIINKITDPHDEMLQCL |
| | | QSKYPSLKGTLGQFFFDDTQLEKDIRDLWMVMNETMFAENLKALTRARYLV |
| | | PKVENIVQVDILSPNVYTIDKGFNHLSKGFKGQSVSQSYFRKISALARGAVVR |
| | | ACPNPHFSSQRGLSSCIEILEDDLFIMSSKDSFTDTDFSEPSVGPVSYKAKKGA |
| | | DTILDSTLSNYDFSKEINFTSTVPIITVEDPLETDEDVPVISEDRTVYVDDYTTF |
| | | HFLEAQKIGKEVVPTQTKVVFTTNMEEALFDSKKVYTVFENTASRINEAGTGI |
| | | ANGMMFYQWLKGIVQDFTEEATQKDTFDKISDVTMIVPYLGNILNIGNDIRK |
| | | GDFMGAVELGGVTILLEAIPELTLPVLIGLTIIEDELEKEQVSQTVYNVLDKRD |
| | | EKWEEVYGFVKQQWWWMVHTQFETRILHAYQALNHQVEAIKANMTYQLA |
| | | NYRGNQEDKELLEKAIDDTLQSLYYAVDQAMHNIKRFLIQSSKSYLLNQMLP |
| | | KTKEQLLAFDQQTLRNVNDFINKNQGVLGESLAKDLKKKVEKRLTSLPVFNL |
| | | EDLPISEFEDLIHSHEIDIINDSKILSLQNRKNTLVDTSGYNAEVSEEGDVQLNPI |
| | | FPFDFKLGSSGEDRGKVIVTQNENIVYNSMYESFSISFWIRINKWVSNLPGYTII |
| | | DSVKNNSGWSIGIISNFLVFTLKQNEDSEQSINFSYDISNNAPGYNKWFFVTVT |
| | | NNMMGNMKIYINGKLIDTIKVKELTGINFSKTITFEINKIPDTGLITSDSDNINM |
| | | WIRDFYIFAKELDGKDINILFNSLQYTNVVKDYWGNDLRYNKEYYMVNIDYL |
| | | NRYMYANSRQIVFNTRRNNNDFNEGYKIIIKRIRGNTNDTRVRGGDILYFDMT |
| | | INNKAYNLFMKNETMYADNHSTEDIYAIGLREQTKDINDNIIFQIQPMNNTYY |
| | | YASQIFKSNFNGENISGICSIGTYRFRLGGDWYRHNYLVPTVKQGNYASLLES |
| | | TSTHWGFVPVSE |
| 122 | BoNT/EN-LC-H_{N} | MVTINDLHYSDPIDEDNIINMRIPLYDLEVDDQFINHNVPDLKAFQVFPNVWV |
| | and BoNT/X-H_{C} | VPERYTFYSTMKNLDAPANPSRSSYYDPTYLQSDAEKEVFLQQMILLFKRINS |
| | | TQEGQQFLNLLSRSIPVPYESNGDVAMGTTQVIKQMDDKGNVLKHRRAHIIIY |
| | | GPGPDLMAKGSKALTKSRETGRGCMAEIYFSPMYHKTYSTKLTNKNSLVDK |
| | | SVQEFVPDPAVTLIHELCHGLHALYGIDLGNVGSWEFNSNPNSLFSSWFSSKE |
| | | AVNFEEVMTFGGEDVKVIKSEIDKKIPGILNLIKTTVEPIINKITDPHDEMLQCL |
| | | QSKYPSLKGTLGQFFFDDTQLEKDIRDLWMVMNETMFAENLKALTRARYLV |
| | | PKVENIVQVDILSPNVYTIDKGFNHLSKGFKGQSVSQSYFRKISALARGAVVR |
| | | ACPNPHFSSQRGLSSCIEILEDDLFIMSSKDSFTDTDFSEPSVGPVSYKAKKGA |
| | | DTILDSTLSNYDFSKEINFTSTVPIITVEDPLETDEDVPVISEDRTVYVDDYTTF |
| | | HFLEAQKIGKEVVPTQTKVVFTTNMEEALFDSKKVYTVFENTASRINEAGTGI |
| | | ANGMMFYQWLKGIVQDFTEEATQKDTFDKISDVTMIVPYLGNILNIGNDIRK |
| | | GDFMGAVELGGVTILLEAIPELTLPVLIGLTIIEDELEKEQVSQTVYNVLDKRD |
| | | EKWEEVYGFVKQQWWWMVHTQFETRILHAYQALNHQVEAIKANMTYQLA |
| | | NYRGNQEDKELLEKAIDDTLQSLYYAVDQAMHNIKRFLIQSSKSYLLNQMLP |
| | | KTKEQLLAFDQQTLRNVNDFINKNQGVLGESLAKDLKKKVEKRLTSLPVFNL |
| | | EDLPISEFEDLIHSHEIDIEDYEVLNLGAEDGKIKDLSGTTSDINIGSDIELADGR |
| | | ENKAIKIKGSENSTIKIAMNKYLRFSATDNFSISFWIKHPKPTNLLNNGIEYTLV |
| | | ENFNQRGWKISIQDSKLIWYLRDHNNSIKIVTPDYIAFNGWNLITITNNRSKGS |
| | | IVYVNGSKIEEKDISSIWNTEVDDPIIFRLKNNRDTQAFTLLDQFSIYRKELNQN |
| | | EVVKLYNYYFNSNYIRDIWGNPLQYNKKYYLQTQDKPGKGLIREYWSSFGY |
| | | DYVILSDSKTITFPNNIRYGALYNGSKVLIKNSKKLDGLVRNKDFIQLEIDGYN |
| | | MGISADRFNEDTNYIGTTYGTTHDLTTDFEIIQRQEKYRNYCQLKTPYNIFHKS |
| | | GLMSTETSKPTFHDYRDWVYSSAWYFQNYENLNLRKHTKTNWYFIPKDEG |
| | | WDED |
| 123 | BoNT/EN-LC-H_{N} | MVTINDLHYSDPIDEDNIINMRIPLYDLEVDDQFINHNVPDLKAFQVFPNVWV |
| | (with modified | VPERYTFYSTMKNLDAPANPSRSSYYDPTYLQSDAEKEVFLQQMILLFKRINS |
| | linker containing | TQEGQQFLNLLSRSIPVPYESNGDVAMGTTQVIKQMDDKGNVLKHRRAHIIIY |
| | thrombin cleavage | GPGPDLMAKGSKALTKSRETGRGCMAEIYFSPMYHKTYSTKLTNKNSLVDK |
| | site) and BoNT/A1- | SVQEFVPDPAVTLIHELCHGLHALYGIDLGNVGSWEFNSNPNSLFSSWFSSKE |
| | H_{C} | AVNFEEVMTFGGEDVKVIKSEIDKKIPGILNLIKTTVEPIINKITDPHDEMLQCL |
| | | QSKYPSLKGTLGQFFFDDTQLEKDIRDLWMVMNETMFAENLKALTRARYLV |
| | | PKVENIVQVDILSPNVYTIDKGFNHLSKGFKGQSVSQSYFRKISALARGAVVR |
| | | ACPNPHFSSQLVPRGSLSSCIEILEDDLFIMSSKDSFTDTDFSEPSVGPVSYKAK |
| | | KGADTILDSTLSNYDFSKEINFTSTVPIITVEDPLETDEDVPVISEDRTVYVDDY |
| | | TTFHFLEAQKIGKEVVPTQTKVVFTTNMEEALFDSKKVYTVFENTASRINEAG |
| | | TGIANGMMFYQWLKGIVQDFTEEATQKDTFDKISDVTMIVPYLGNILNIGNDI |
| | | RKGDFMGAVELGGVTILLEAIPELTLPVLIGLTIIEDELEKEQVSQTVYNVLDK |
| | | RDEKWEEVYGFVKQQWWWMVHTQFETRILHAYQALNHQVEAIKANMTYQ |
| | | LANYRGNQEDKELLEKAIDDTLQSLYYAVDQAMHNIKRFLIQSSKSYLLNQM |
| | | LPKTKEQLLAFDQQTLRNVNDFINKNQGVLGESLAKDLKKKVEKRLTSLPVF |
| | | NLEDLPISEFEDLIHSHEIDIIINTSILNLRYESNHLIDLSRYASKINIGSKVNFDPI |
| | | DKNQIQLFNLESSKIEVILKNAIVYNSMYENFSTSFWIRIPKYFNSISLNNEYTII |
| | | NCMENNSGWKVSLNYGEIIWTLQDTQEIKQRVVFKYSQMINISDYINRWIFVT |
| | | ITNNRLNNSKIYINGRLIDQKPISNLGNIHASNNIMFKLDGCRDTHRYIWIKYF |
| | | NLFDKELNEKEIKDLYDNQSNSGILKDFWGDYLQYDKPYYMLNLYDPNKYV |
| | | DVNNVGIRGYMYLKGPRGSVMTTNIYLNSSLYRGTKFIIKKYASGNKDNIVR |
| | | NNDRVYINVVVKNKEYRLATNASQAGVEKILSALEIPDVGNLSQVVVMKSK |
| | | NDQGITNKCKMNLQDNNGNDIGFIGFHQFNNIAKLVASNWYNRQIERSSRTL |
| | | GCSWEFIPVDDGWGERPL |
| 124 | BoNT/EN-LC-H_{N} | MVTINDLHYSDPIDEDNIINMRIPLYDLEVDDQFINHNVPDLKAFQVFPNVWV |
| | (with modified | VPERYTFYSTMKNLDAPANPSRSSYYDPTYLQSDAEKEVFLQQMILLFKRINS |
| | linker containing | TQEGQQFLNLLSRSIPVPYESNGDVAMGTTQVIKQMDDKGNVLKHRRAHIIIY |
| | thrombin cleavage | GPGPDLMAKGSKALTKSRETGRGCMAEIYFSPMYHKTYSTKLTNKNSLVDK |
| | site) and BoNT/B1- | SVQEFVPDPAVTLIHELCHGLHALYGIDLGNVGSWEFNSNPNSLFSSWFSSKE |
| | H_{C} | AVNFEEVMTFGGEDVKVIKSEIDKKIPGILNLIKTTVEPIINKITDPHDEMLQCL |
| | | QSKYPSLKGTLGQFFFDDTQLEKDIRDLWMVMNETMFAENLKALTRARYLV |
| | | PKVENIVQVDILSPNVYTIDKGFNHLSKGFKGQSVSQSYFRKISALARGAVVR |
| | | ACPNPHFSSQLVPRGSLSSCIEILEDDLFIMSSKDSFTDTDFSEPSVGPVSYKAK |
| | | KGADTILDSTLSNYDFSKEINFTSTVPIITVEDPLETDEDVPVISEDRTVYVDDY |
| | | TTFHFLEAQKIGKEVVPTQTKVVFTTNMEEALFDSKKVYTVFENTASRINEAG |
| | | TGIANGMMFYQWLKGIVQDFTEEATQKDTFDKISDVTMIVPYLGNILNIGNDI |
| | | RKGDFMGAVELGGVTILLEAIPELTLPVLIGLTIIEDELEKEQVSQTVYNVLDK |
| | | RDEKWEEVYGFVKQQWWWMVHTQFETRILHAYQALNHQVEAIKANMTYQ |
| | | LANYRGNQEDKELLEKAIDDTLQSLYYAVDQAMHNIKRFLIQSSKSYLLNQM |
| | | LPKTKEQLLAFDQQTLRNVNDFINKNQGVLGESLAKDLKKKVEKRLTSLPVF |
| | | NLEDLPISEFEDLIHSHEIDIILNNIILNLRYKDNNLIDLSGYGAKVEVYDGVEL |
| | | NDKNQFKLTSSANSKIRVTQNQNIIFNSVFLDFSVSFWIRIPKYKNDGIQNYIH |
| | | NEYTIINCMKNNSGWKISIRGNRIIWTLIDINGKTKSVFFEYNIREDISEYINRW |
| | | FFVTITNNLNNAKIYINGKLESNTDIKDIREVIANGEIIFKLDGDIDRTQFIWMK |
| | | YFSIFNTELSQSNIEERYKIQSYSEYLKDFWGNPLMYNKEYYMFNAGNKNSYI |
| | | KLKKDSPVGEILTRSKYNQNSKYINYRDLYIGEKFIIRRKSNSQSINDDIVRKE |
| | | DYIYLDFFNLNQEWRVYTYKYFKKEEEKLFLAPISDSDEFYNTIQIKEYDEQPT |
| | | YSCQLLFKKDEESTDEIGLIGIHRFYESGIVFEEYKDYFCISKWYLKEVKRKPY |
| | | NLKLGCNWQFIPKDEGWTE |
| 125 | BoNT/EN-LC-H_{N} | MVTINDLHYSDPIDEDNIINMRIPLYDLEVDDQFINHNVPDLKAFQVFPNVWV |
| | (with modified | VPERYTFYSTMKNLDAPANPSRSSYYDPTYLQSDAEKEVFLQQMILLFKRINS |
| | linker containing | TQEGQQFLNLLSRSIPVPYESNGDVAMGTTQVIKQMDDKGNVLKHRRAHIIIY |
| | thrombin cleavage | GPGPDLMAKGSKALTKSRETGRGCMAEIYFSPMYHKTYSTKLTNKNSLVDK |
| | site) and BoNT/C 1- | SVQEFVPDPAVTLIHELCHGLHALYGIDLGNVGSWEFNSNPNSLFSSWFSSKE |
| | H_{C} | AVNFEEVMTFGGEDVKVIKSEIDKKIPGILNLIKTTVEPIINKITDPHDEMLQCL |
| | | QSKYPSLKGTLGQFFFDDTQLEKDIRDLWMVMNETMFAENLKALTRARYLV |
| | | PKVENIVQVDILSPNVYTIDKGFNHLSKGFKGQSVSQSYFRKISALARGAVVR |
| | | ACPNPHFSSQLVPRGSLSSCIEILEDDLFIMSSKDSFTDTDFSEPSVGPVSYKAK |
| | | KGADTILDSTLSNYDFSKEINFTSTVPIITVEDPLETDEDVPVISEDRTVYVDDY |
| | | TTFHFLEAQKIGKEVVPTQTKVVFTTNMEEALFDSKKVYTVFENTASRINEAG |
| | | TGIANGMMFYQWLKGIVQDFTEEATQKDTFDKISDVTMIVPYLGNILNIGNDI |
| | | RKGDFMGAVELGGVTILLEAIPELTLPVLIGLTIIEDELEKEQVSQTVYNVLDK |
| | | RDEKWEEVYGFVKQQWWWMVHTQFETRILHAYQALNHQVEAIKANMTYQ |
| | | LANYRGNQEDKELLEKAIDDTLQSLYYAVDQAMHNIKRFLIQSSKSYLLNQM |
| | | LPKTKEQLLAFDQQTLRNVNDFINKNQGVLGESLAKDLKKKVEKRLTSLPVF |
| | | NLEDLPISEFEDLIHSHEIDIINDSKILSLQNRKNTLVDTSGYNAEVSEEGDVQL |
| | | NPIFPFDFKLGSSGEDRGKVIVTQNENIVYNSMYESFSISFWIRINKWVSNLPG |
| | | YTIIDSVKNNSGWSIGIISNFLVFTLKQNEDSEQSINFSYDISNNAPGYNKW1Th V |
| | | TVTNNMMGNMKIYINGKLIDTIKVKELTGINFSKTITFEINKIPDTGLITSDSDN |
| | | INMWIRDFYIFAKELDGKDINILFNSLQYTNVVKDYWGNDLRYNKEYYMVNI |
| | | DYLNRYMYANSRQIVFNTRRNNNDFNEGYKIIIKRIRGNTNDTRVRGGDILYF |
| | | DMTINNKAYNLFMKNETMYADNHSTEDIYAIGLREQTKDINDNIIFQIQPMNN |
| | | TYYYASQIFKSNFNGENISGICSIGTYRFRLGGDWYRHNYLVPTVKQGNYASL |
| | | LESTSTHWGFVPVSE |
| 126 | BoNT/EN-LC-H_{N} | MVTINDLHYSDPIDEDNIINMRIPLYDLEVDDQFINHNVPDLKAFQVFPNVWV |
| | (with modified | VPERYTFYSTMKNLDAPANPSRSSYYDPTYLQSDAEKEVFLQQMILLFKRINS |
| | linker containing | TQEGQQFLNLLSRSIPVPYESNGDVAMGTTQVIKQMDDKGNVLKHRRAHIIIY |
| | thrombin cleavage | GPGPDLMAKGSKALTKSRETGRGCMAEIYFSPMYHKTYSTKLTNKNSLVDK |
| | site) and BoNT/X- | SVQEFVPDPAVTLIHELCHGLHALYGIDLGNVGSWEFNSNPNSLFSSWFSSKE |
| | H_{C} | AVNFEEVMTFGGEDVKVIKSEIDKKIPGILNLIKTTVEPIINKITDPHDEMLQCL |
| | | QSKYPSLKGTLGQFFFDDTQLEKDIRDLWMVMNETMFAENLKALTRARYLV |
| | | PKVENIVQVDILSPNVYTIDKGFNHLSKGFKGQSVSQSYFRKISALARGAVVR |
| | | ACPNPHFSSQLVPRGSLSSCIEILEDDLFIMSSKDSFTDTDFSEPSVGPVSYKAK |
| | | KGADTILDSTLSNYDFSKEINFTSTVPIITVEDPLETDEDVPVISEDRTVYVDDY |
| | | TTFHFLEAQKIGKEVVPTQTKVVFTTNMEEALFDSKKVYTVFENTASRINEAG |
| | | TGIANGMMFYQWLKGIVQDFTEEATQKDTFDKISDVTMIVPYLGNILNIGNDI |
| | | RKGDFMGAVELGGVTILLEAIPELTLPVLIGLTIIEDELEKEQVSQTVYNVLDK |
| | | RDEKWEEVYGFVKQQWWWMVHTQFETRILHAYQALNHQVEAIKANMTYQ |
| | | LANYRGNQEDKELLEKAIDDTLQSLYYAVDQAMHNIKRFLIQSSKSYLLNQM |
| | | LPKTKEQLLAFDQQTLRNVNDFINKNQGVLGESLAKDLKKKVEKRLTSLPVF |
| | | NLEDLPISEFEDLIHSHEIDIEDYEVLNLGAEDGKIKDLSGTTSDINIGSDIELAD |
| | | GRENKAIKIKGSENSTIKIAMNKYLRFSATDNFSISFWIKHPKPTNLLNNGIEYT |
| | | LVENFNQRGWKISIQDSKLIWYLRDHNNSIKIVTPDYIAFNGWNLITITNNRSK |
| | | GSIVYVNGSKIEEKDISSIWNTEVDDPIIFRLKNNRDTQAFTLLDQFSIYRKELN |
| | | QNEVVKLYNYYFNSNYIRDIWGNPLQYNKKYYLQTQDKPGKGLIREYWSSF |
| | | GYDYVILSDSKTITFPNNIRYGALYNGSKVLIKNSKKLDGLVRNKDFIQLEIDG |
| | | YNMGISADRFNEDTNYIGTTYGTTHDLTTDFEIIQRQEKYRNYCQLKTPYNIF |
| | | HKSGLMSTETSKPTFHDYRDWVYSSAWYFQNYENLNLRKHTKTNWYFIPKD |
| | | EGWDED |
| 127 | BoNT/A1 | MPFVNKQFNYKDPVNGVDIAYIKIPNAGQMQPVKAFKIHNKIWVIPERDTFT |
| | (ACS52162.1) | NPEEGDLNPPPEAKQVPVSYYDSTYLSTDNEKDNYLKGVTKLFERIYSTDLGR |
| | | MLLTSIVRGIPFWGGSTIDTELKVIDTNCINVIQPDGSYRSEELNLVIIGPSADII |
| | | QFECKSFGHEVLNLTRNGYGSTQYIRFSPDFTFGFEESLEVDTNPLLGAGKFA |
| | | TDPAVTLAHELIHAGHRLYGIAINPNRVFKVNTNAYYEMSGLEVSFEELRTFG |
| | | GHDAKFIDSLQENEFRLYYYNKFKDIASTLNKAKSIVGTTASLQYMKNVFKE |
| | | KYLLSEDTSGKFSVDKLKFDKLYKMLTEIYTEDNFVKFFKVLNRKTYLNFDK |
| | | AVFKINIVPKVNYTIYDGFNLRNTNLAANFNGQNTEINNMNFTKLKNFTGLFE |
| | | FYKLLCVRGIITSKTKSLDKGYNKALNDLCIKVNNWDLFFSPSEDNFTNDLNK |
| | | GEEITSDTNIEAAEENISLDLIQQYYLTFNFDNEPENISIENLSSDIIGQLELMPNI |
| | | ERFPNGKKYELDKYTMFHYLRAQEFEHGKSRIALTNSVNEALLNPSRVYTFFS |
| | | SDYVKKVNKATEAAMFLGWVEQLVYDFTDETSEVSTTDKIADITIIIPYIGPAL |
| | | NIGNMLYKDDFVGALIFSGAVILLEFIPEIAIPVLGTFALVSYIANKVLTVQTID |
| | | NALSKRNEKWDEVYKYIVTNWLAKVNTQIDLIRKKMKEALENQAEATKAII |
| | | NYQYNQYTEEEKNNINFNIDDLSSKLNESINKAMININKFLNQCSVSYLMNSM |
| | | IPYGVKRLEDFDASLKDALLKYIYDNRGTLIGQVDRLKDKVNNTLSTDIPFQL |
| | | SKYVDNQRLLSTFTEYIKNIINTSILNLRYESNHLIDLSRYASKINIGSKVNFDPI |
| | | DKNQIQLFNLESSKIEVILKNAIVYNSMYENFSTSFWIRIPKYFNSISLNNEYTII |
| | | NCMENNSGWKVSLNYGEIIWTLQDTQEIKQRVVFKYSQMINISDYINRWIFVT |
| | | ITNNRLNNSKIYINGRLIDQKPISNLGNIHASNNIMFKLDGCRDTHRYIWIKYF |
| | | NLFDKELNEKEIKDLYDNQSNSGILKDFWGDYLQYDKPYYMLNLYDPNKYV |
| | | DVNNVGIRGYMYLKGPRGSVMTTNIYLNSSLYRGTKFIIKKYASGNKDNIVR |
| | | NNDRVYINVVVKNKEYRLATNASQAGVEKILSALEIPDVGNLSQVVVMKSK |
| | | NDQGITNKCKMNLQDNNGNDIGFIGFHQFNNIAKLVASNWYNRQIERSSRTL |
| | | GCSWEFIPVDDGWGERPL |
| 128 | BoNT/A2 (X73423) | MPFVNKQFNYKDPVNGVDIAYIKIPNAGQMQPVKAFKIHNKIWVIPERDTFT |
| | | NPEEGDLNPPPEAKQVPVSYYDSTYLSTDNEKDNYLKGVTKLFERIYSTDLGR |
| | | MLLTSIVRGIPFWGGSTIDTELKVIDTNCINVIQPDGSYRSEELNLVIIGPSADII |
| | | QFECKSFGHDVLNLTRNGYGSTQYIRFSPDFTFGFEESLEVDTNPLLGAGKFA |
| | | TDPAVTLAHELIHAEHRLYGIAINPNRVFKVNTNAYYEMSGLEVSFEELRTFG |
| | | GHDAKFIDSLQENEFRLYYYNKFKDVASTLNKAKSIIGTTASLQYMKNVFKE |
| | | KYLLSEDTSGKFSVDKLKFDKLYKMLTEIYTEDNFVNFFKVINRKTYLNFDK |
| | | AVFRINIVPDENYTIKDGFNLKGANLSTNFNGQNTEINSRNFTRLKNFTGLPEF |
| | | YKLLCVRGIIPFKTKSLDEGYNKALNDLCIKVNNWDLFFSPSEDNFTNDLDKV |
| | | EEITADTNIEAAEENISLDLIQQYYLTFDFDNEPENISIENLSSDIIGQLEPMPNIE |
| | | RFPNGKKYELDKYTMFHYLRAQEFEHGDSRIILTNSAEEALLKPNVAYTFFSS |
| | | KYVKKINKAVEAFMFLNWAEELVYDFTDETNEVTTMDKIADITIIVPYIGPAL |
| | | NIGNMLSKGEFVEAIIFTGVVAMLEFIPEYALPVFGTFAIVSYIANKVLTVQTIN |
| | | NALSKRNEKWDEVYKYTVTNWLAKVNTQIDLIREKMKKALENQAEATKAII |
| | | NYQYNQYTEEEKNNINFNIDDLSSKLNESINSAMININKFLDQCSVSYLMNSM |
| | | IPYAVKRLKDFDASVRDVLLKYIYDNRGTLVLQVDRLKDEVNNTLSADIPFQ |
| | | LSKYVDNKKLLSTFTEYIKNIVNTSILSIVYKKDDLIDLSRYGAKINIGDRVYY |
| | | DSIDKNQIKLINLESSTIEVILKNAIVYNSMYENFSTSFWIKIPKYFSKINLNNEY |
| | | TIINCIENNSGWKVSLNYGEIIWTLQDNKQNIQRVVFKYSQMVNISDYINRWIF |
| | | VTITNNRLTKSKIYINGRLIDQKPISNLGNIHASNKIMFKLDGCRDPRRYIMIKY |
| | | FNLFDKELNEKEIKDLYDSQSNSGILKDFWGNYLQYDKPYYMLNLFDPNKYV |
| | | DVNNIGIRGYMYLKGPRGSVVTTNIYLNSTLYEGTKFIIKKYASGNEDNIVRN |
| | | NDRVYINVVVKNKEYRLATNASQAGVEKILSALEIPDVGNLSQVVVMKSKD |
| | | DQGIRNKCKMNLQDNNGNDIGFIGFHLYDNIAKLVASNWYNRQVGKASRTF |
| | | GCSWEFIPVDDGWGESSL |
| 129 | BoNT/A3 | MPFVNKPFNYRDPGNGVDIAYIKIPNAGQMQPVKAFKIHEGVWVIPERDTFT |
| | (aba29017) | NPEEGDLNPPPEAKQVPVSYYDSTYLSTDNEKDNYLKGVIKLFDRIYSTGLGR |
| | | MLLSFIVKGIPFWGGSTIDTELKVIDTNCINVIEPGGSYRSEELNLVITGPSADII |
| | | QFECKSFGHDVFNLTRNGYGSTQYIRFSPDFTFGFEESLEVDTNPLLGAGTFAT |
| | | DPAVTLAHELIHAAHRLYGIAINPNRVLKVKTNAYYEMSGLEVSFEELRTFGG |
| | | NDTNFIDSLWQKKFSRDAYDNLQNIARILNEAKTIVGTTTPLQYMKNIFIRKY |
| | | FLSEDASGKISVNKAAFKEFYRVLTRGFTELEFVNPFKVINRKTYLNFDKAVF |
| | | RINIVPDENYTINEGFNLEGANSNGQNTEINSRNFTRLKNFTGLFEFYKLLCVR |
| | | GIIPFKTKSLDEGYNKALNYLCIKVNNWDLFFSPSEDNFTNDLDKVEEITADT |
| | | NIEAAEENISSDLIQQYYLTFDFDNEPENISIENLSSDIIGQLEPMPNIERFPNGK |
| | | KYELDKYTMFHYLRAQEFEHGDSRIILTNSAEEALLKPNVAYTFFSSKYVKKI |
| | | NKAVEAVIFLSWAEELVYDFTDETNEVTTMDKIADITIIVPYIGPALNIGNMVS |
| | | KGEFVEAILFTGVVALLEFIPEYSLPVFGTFAIVSYIANKVLTVQTINNALSKRN |
| | | EKWDEVYKYTVTNWLAKVNTQIDLIREKMKKALENQAEATRAIINYQYNQY |
| | | TEEEKNNINFNIDDLSSKLNRSINRAMININKFLDQCSVSYLMNSMIPYAVKRL |
| | | KDFDASVRDVLLKYIYDNRGTLILQVDRLKDEVNNTLSADIPFQLSKYVNDK |
| | | KLLSTFTEYIKNIVNTSILSIVYKKDDLIDLSRYGAKINIGDRVYYDSIDKNQIK |
| | | LINLESSTIEVILKNAIVYNSMYENFSTSFWIKIPKYFSKINLNNEYTIINCIENNS |
| | | GWKVSLNYGEIIWTLQDNKQNIQRVVFKYSQMVNISDYINRWMFVTITNNRL |
| | | TKSKIYINGRLIDQKPISNLGNIHASNKIMFKLDGCRDPRRYIMIKYFNLFDKEL |
| | | NEKEIKDLYDSQSNPGILKDFWGNYLQYDKPYYMLNLFDPNKYVDVNNIGIR |
| | | GYMYLKGPRGSVMTTNIYLNSTLYMGTKFIIKKYASGNEDNIVRNNDRVYIN |
| | | VVVKNKEYRLATNASQAGVEKILSALEIPDVGNLSQVVVMKSKDDQGIRNK |
| | | CKYINLQDNNGNDIGFVGFHLYDNIAKLVASNWYNRQVGKASRTFGCSWEFI |
| | | PVDDGWGESSL |
| 130 | BoNT/A4 | MPLVNQQINYYDPVNGVDIAYIKIPNAGKMQPVKAFKIHNKVWVIPERDIFTN |
| | (aba29018) | PEEVDLNPPPEAKQVPISYYDSAYLSTDNEKDNYLKGVIKLFERIYSTDLGRM |
| | | LLISIVRGIPFWGGGKIDTELKVIDTNCINIIQLDDSYRSEELNLAIIGPSANIIES |
| | | QCSSFRDDVLNLTRNGYGSTQYIRFSPDFTVGFEESLEVDTNPLLGAGKFAQD |
| | | PAVALAHELIHAEHRLYGIAINTNRVFKVNTNAYYEMAGLEVSLEELITFGGN |
| | | DAKFIDSLQKKEFSLYYYNKFKDIASTLNKAKSIVGTTASLQYMKNVFKEKY |
| | | LLSEDATGKFLVDRLKFDELYKLLTEIYTEDNFVKFFKVLNRKTYLNFDKAVF |
| | | KINIVPDVNYTIHDGFNLRNTNLAANFNGQNIEINNKNFDKLKNFTGLFEFYK |
| | | LLCVRGIITSKTKSLDEGYNKALNELCIKVNNWDLFFSPSEDNFTNDLDKVEEI |
| | | TSDTNIEAAEENISLDLIQQYYLNFNFDNEPENTSIENLSSDIIGQLEPMPNIERF |
| | | PNGKKYELNKYTMFHYLRAQEFKHSNSRIILTNSAKEALLKPNIVYTFFSSKYI |
| | | KAINKAVEAVTFVNWIENLVYDFTDETNEVSTMDKIADITIVIPYIGPALNIGN |
| | | MIYKGEFVEAIIFSGAVILLEIVPEIALPVLGTFALVSYVSNKVLTVQTIDNALS |
| | | KRNEKWDEVYKYIVTNWLAIVNTQINLIREKMKKALENQAEATKAIINYQYN |
| | | QYTEEEKNNINFNIDDLSSKLNESINSAMININKFLDQCSVSYLMNSMIPYAVK |
| | | RLKDFDASVRDVLLKYIYDNRGTLIGQVNRLKDKVNNTLSADIPFQLSKYVD |
| | | NKKLLSTFTEYIKNITNASILSIVYKDDDLIDLSRYGAEIYNGDKVYYNSIDKN |
| | | QIRLINLESSTIEVILKKAIVYNSMYENFSTSFWIRIPKYFNSISLNNEYTIINCME |
| | | NNSGWKVSLNYGEIIWTFQDTQEIKQRVVFKYSQMINISDYINRWIFVTITNN |
| | | RITKSKIYINGRLIDQKPISNLGNIHASNKIMFKLDGCRDPHRYIVIKYFNLFDK |
| | | ELSEKEIKDLYDNQSNSGILKDFWGDYLQYDKSYYMLNLYDPNKYVDVNNV |
| | | GIRGYMYLKGPRDNVMTTNIYLNSSLYMGTKFIIKKYASGNKDNIVRNNDRV |
| | | YINVVVKNKEYRLATNASQAGVEKILSALEIPDVGNLSQVVVMKSKNDQGIT |
| | | NKCKMNLQDNNGNDIGFIGFHQFNNIAKLVASNWYNRQIERSSRTLGCSWEF |
| | | IPVDDGWRERPL |
| 131 | BoNT/A5 (a661222) | MPFVNKQFNYKDPVNGVDIAYIKIPNAGQMQPVKAFKIHNKIWVIPERDTFT |
| | | NPEEGDLNPPPEAKQVPVSYYDSTYLSTDNEKDNYLKGVTKLFERIYSTELGR |
| | | MLLTSIVRGIPFWGGSTIDTELKVIDTNCINVIQPDGSYRSEELNLVIIGPSADII |
| | | QFECKSFGHDVLNLTRNGYGSTQYIRFSPDFTFGFEESLEVDTNPLLGAGKFA |
| | | TDPAVTLAHELIHAGHRLYGIAINPNRVFKVNTNAYYEMSGLEVSFEELRTFG |
| | | EHDAKFIDSLQENEFRLYYYNKFKDIASTLNKAKSIVGTTASLQYMKNVFKE |
| | | KYLLSEDTSGKFSVDKLKFDKLYKMLTEIYTEDNFVKFFKVLNRKTYLNFDK |
| | | AVFKINIVPEVNYTIYDGFNLRNTNLAANFNGQNTEINNMNFTKLKNFTGLFE |
| | | FYKLLCVRGIITSKTKSLDEGYNKALNDLCIKVNNWDLFFSPSEDNFTNDLNK |
| | | GEEITSDTNIEAAEENISLDLIQQYYLTFNFDNEPENISIENLSSDIIGQLELMPNI |
| | | ERFPNGKKYELDKYTMFHYLRAQEFEHGKSRIVLTNSVNEALLNPSSVYTFFS |
| | | SDYVRKVNKATEAAMFLGWVEQLVYDFTDETSEVSTTDKIADITIIIPYIGPAL |
| | | NIGNMLYKDDFVGALIFSGAVILLEFIPEIAIPVLGTFALVSYIANKVLTVQTID |
| | | NALSKRNEKWGEVYKYIVTNWLAKVNTQIDLIRKKMKEALENQAEATKAII |
| | | NYQYNQYTEEEKNNINFNIGDLSSKLNDSINKAMININKFLNQCSVSYLMNSM |
| | | IPYGVKRLEDFDASLKDALLKYIYDNRGTLIGQVDRLKDKVNNTLSTDIPFQL |
| | | SKYVDNQRLLSTFTEYIKNIINTSILNLRYESNHLIDLSRYASEINIGSKVNFDPI |
| | | DKNQIQLFNLESSKIEIILKNAIVYNSMYENFSTSFWIKIPKYFSKINLNNEYTII |
| | | NCIENNSGWKVSLNYGEIIWTLQDNKQNIQRVVFKYSQMVAISDYINRWIFITI |
| | | TNNRLNNSKIYINGRLIDQKPISNLGNIHASNNIMFKLDGCRDPQRYIWIKYFN |
| | | LFDKELNEKEIKDLYDNQSNSGILKDFWGNYLQYDKPYYMLNLYDPNKYVD |
| | | VNNVGIRGYMYLKGPRGSIVTTNIYLNSSLYMGTKFIIKKYASGNKDNIVRNN |
| | | DRVYINVVVKNKEYRLATNASQAGVEKILSVLEIPDVGNLSQVVVMKSKND |
| | | QGIRNKCKMNLQDNNGNDIGFIGFHQFNNIDKLVASNWYNRQIERSSRTFGC |
| | | SWEFIPVDDGWGESPL |
| 132 | BoNT/A6 | MPFVNKQFNYKDPVNGVDIAYIKIPNAGQMQPVKAFKIHNKIWVIPERDTFT |
| | (fj981696) | NPEEGDLNPPPEAKQVPVSYYDSTYLSTDNEKDNYLKGVTKLFERIYSTDLGR |
| | | MLLTSIVRGIPFWGGSTIDTELKVIDTNCINVIQPDGSYRSEELNLVIIGPSADII |
| | | QFECKSFGHEVLNLTRNGYGSTQYIRFSPDFTFGFEESLEVDTNPLLGAGKFA |
| | | TDPAVTLAHELIHAGHRLYGIAINPNRVFKVNTNAYYEMSGLEVSFEELRTFG |
| | | GHDAKFIDSLQENEFRLYYYNKFKDIASTLNKAKSIVGTTASLQYMKNVFKE |
| | | KYLLSEDTSGKFSVDKLKFDKLYKMLTEIYTEDNFVKFFKVLNRKTYLNFDK |
| | | AVFKINIVPKVNYTIYDGFNLRNTNLAANFNGQNTEINNMNFAKLKNFTGLFE |
| | | FYKLLCVRGIITSKTKSLDKGYNKALNDLCIKVNNWDLFFSPSEDNFTNDLNK |
| | | GEEITSDTNIEAAEENISLDLIQQYYLTFNFDNEPENISIENLSSDIIGQLELMPNI |
| | | ERFPNGKKYELDKYTMFHYLSAQEFEHGKSRIDLTNSVNEALLNPSHVYTFFS |
| | | SDYVKKVNKATEAAMFLGWVEQLVYDFTDETSEVSTTDKIADITIIIPYIGPAL |
| | | NIGNMLYKDDFVGALIFSGAVILLEFIPEIAIPVLGTFAIVSYIANKVLTVQTINN |
| | | ALSKRNEKWDEVYKYTVTNWLAKVNTQIDLIREKMKKALENQAEATKAIIN |
| | | YQYNQYTEEEKNNINFNIDDLSSKLNESINSAMININKFLDQCSVSYLMNSMIP |
| | | YAVKRLKDFDASVRDVLLKYIYDNRGTLIGQVDRLKDKVNNTLSTDIPFQLS |
| | | KYVDNQRLLSTFTEYIKNIINTSILSLRYENNHLIDLSRYASKINIGSRVNFDPID |
| | | KNQIQLFNLESSKIEVILKNAIVYNSMYENFSTSFWIKIPKYFSEISLNNEYTIIN |
| | | CIENNSGWKVSLNYGEIIWTLQDNKQNIQRVVFKYSQMVAISDYINRWIFITIT |
| | | NNRLTKSKIYINGRLIDQKPISNLGNIHASNKIMFKLDGCRDPRRYIMIKYFNL |
| | | FDKELNEKEIKDLYDSQSNSGILKDFWGNYLQYDKPYYMLNLFDPNKYVDV |
| | | NNVGIRGYMYLKGSRSTLLTTNIYLNSGLYMGTKFIIKKYASGNKDNIVRNN |
| | | DRVYINVVVNNKEYRLATNASQAGVEKILSALEIPDIGNLSQVVVMKSKNDQ |
| | | GIRNKCKMNLQDNNGNDIGFIGFHKFNDIYKLVASNWYNRQIEISSRTFGCSW |
| | | EFIPVDDGWGEKPL |
| 133 | BoNT/A7 | MPFVNKQFNYKDPVNGVDIAYIKIPNAGQMQPVKAFKIHNKIWVIPERDIFTN |
| | (JQ954969) | PEEGDLNPPPEAKQVPVSYYDSTYLSTDNEKDNYLKGVTKLFERIYSTDLGR |
| | | MLLTSIVRGIPFWGGSTIDTELKVIDTNCINVIQPDGSYRSEELNLVIIGPSADII |
| | | NFECKSFGHDVLNLTRNGYGSTQYIRFSPDFTFGFEESLEVDTNPLLGAGKFAI |
| | | DPAVTLAHELIHAGHRLYGIAINPNRVFKVNTNAYYEMSGLEVSFEELRTFGG |
| | | HDAKFIDSLQENEFRLYYYNKFKEVASILNKAKSIIGTTASLQYMKNVFKEKY |
| | | LLSEDTSGKFSVDKLRFDKLYKMLTEIYTEDNFVKFFKVLNRKTYLNFDKAV |
| | | FKMNIVPEVNYTIYDGFNLRNTNLAANFNGQNTEINNMNFTKLKNFTGLFEF |
| | | YKLLCVRGIITSKTKSLDEGYNKALNDLCIKVNNWDLFFSPSEDNFTNDLNKG |
| | | EEITSDTNIEAAEENISSDLIQQYYLTFNFDNEPENISIENLSSDIIGQLELMPNIE |
| | | RFPNGKKYELDKYTMFHYLRAQEFEYGNSRIVLINSVNEALLNPSSVYTFFSS |
| | | DYVKKANEATEAAMFLGWVEQLVYDFTDETSEVSTMDKIADITIIVPYIGPAL |
| | | NIGNMVYKKKFEEALIFSGAVILLEFVPEIVLPILGTFALVSYTSNKVLTVRTID |
| | | NALSKRNEKWEEVYKYIVTNWLAKVNTQINLIRKKMKEALENQAEATKAIIN |
| | | YQYNQYTEEEKNNINFNIGDLSSKLNDSINKAMININKFLDQCSVSYLMNSMI |
| | | PQGVKQLKDFDTSLRDSLLKYIYDNRGTLIGQVDRLKDKVNNTLSTDIPFQLS |
| | | KYADNQRLLSTFTEYIKNIINTSILNLRYESNHLIDLSRYASKINIGSRVNFDPID |
| | | KNQIQLFNLESSKIEVILKNAIVYNSMYENFSTSFWIKIPKYFSKINLNNEYTIIN |
| | | CIENNSGWKVSLNYGEIIWTLQDNEQNIQRVVFKYSQMVNISDYINRWIFVTI |
| | | TNNRLTKSKIYINGRLIDQKPISNLGNIHASNKIMFKLDGCRDPHRYILIKYFNL |
| | | FDKELNEKEIKDLYDNQSNSGILKDFWGDYLQYDKPYYMLNLYDPNKYIDV |
| | | NNIGIRGYMYLKGPRGSVTTTNIYLNSMLYMGTKFIIKKHASGNKDNIVRNN |
| | | DRVYINVLVKNKEYRLATNASQAGGEKILSAVEIPDVGNLSQVVVMKSKND |
| | | QGIRNKCKMNLQDNNGNDIGFIGFHQFNNIAKLVASNWYNRQIGKTSVTLGC |
| | | SWELIPVDYGWGESSL |
| 134 | BoNT/A8 | MPFVNKQFNYKDTVNGIDIAYIKIPNAGQMQPVKAFKIHNKIWVIPERDTFTN |
| | (KM233166) | PKEGDLNPPPEAKQVPVSYYDSTYLSTDNEKDNYLKGVTKLFERIYSTDLGR |
| | | MLLTSIVRGIPFWGGSTIDTELKVIDTNCINVIQPDGSYRSEELNLVIIGPSADII |
| | | QFECKSFGHDVLNLTRNGYGSTQYIRFSPDFTFGFEESLEVDTNPLLGAGKFA |
| | | TDPAVTLAHELIHAEHRLYGIAINPNRVFKVNTNAYYEMSGLEVSFEELRTFG |
| | | GHNAKFIDSLQENEFRLYYYNKFKDIASTLNKAKSIVGTTASLQYMKNVFKE |
| | | KYLLSEDTSGKFSVDKLKFDKLYKMLTEIYTEDNFVKFFKVLNRKTYLNFDK |
| | | AVFKINIVPDENYTIKDGFNLKNTNLAANFNGQNTEINSRNFTKLKNFTGLFEF |
| | | YKLLCVRGIIPFKTKSLDEGYNKALNDLCIKVNNWDLFFSPSEDNFTNDLDKV |
| | | EEITSDTNIEAAEENISLDLIQQYYLTFDFDNEPENISIENLSSDIIGQLEPMPNIE |
| | | RFPNGKKYELDKYTMFHYLRAQEFEHSKSRIALTNSVNEALLNPSRVYTFFSS |
| | | DYVKKVNKATEAAMFLGWVEQLVYDFTDETSEVSTTDKIADITIIIPYIGPAL |
| | | NIGNMLYKDDFVGALIFSGAVILLEFIPEIAIPVLGTFALVSYIANKVLTVQTID |
| | | NALSKRNEKWDEVYKYIVTNWLAKVNTQIDLVRKKMKEALENQAEATKAII |
| | | NYQYNQYTEEEKNNINFNIDDLSSKLNESINSAMTNINKFLDQCSVSYLMNSM |
| | | IPYAVKRLKDFDASVREVLLKYIYDNRGTLILQVDRLKDKVNNTLSADIPFQL |
| | | SKYVDNKKLLSTFTEYIKNITNTSILSIVVDKDGRLIDLSRYGAEIYNGDKVSY |
| | | NSIDKNQIKLINLESSAIEVILKNAIVYNSMYENFSTSFWIKIPKYFSKINLNNEY |
| | | TIINCIENNSGWKVSLNYGEIIWTLQDNQQNIQRVVFKYSQMVNISDYINRWIF |
| | | VTITNNRLDKSKIYINGRLIDQKPISNLGNIHASNNIMFKLDGCRDPRRYIVIKY |
| | | FNLFDKELNEKEIKDLYDNQSNSGILKDFWGDYLQYDKPYYMLNLYDPNKY |
| | | VDVNNIGIRGYMYLKGPRGSVVTTNIYLNSTLYMGTKFIIKKYASGNKDNIVR |
| | | NNDRVYINVVVKNKEYRLATNALQAGVEKILSALEIPDVGNLSQVVVMKSK |
| | | NDQGIRNKCKMNLQDNNGNDIGLIGFHQFNNIAKLVASNWYNRQVGKASRT |
| | | FGCSWEFIPVDDGWGESSQ |
| 135 | BoNT/C (ay251553) | MPITINNFNYSDPVDNKNILYLDTHLNTLANEPEKAFRITGNIWVIPDRFSRNS |
| | | NPNLNKPPRVTSPKSGYYDPNYLSTDSDKDPFLKEIIKLFKRINSREIGEELIYR |
| | | LSTDIPFPGNNNTPINTFDFDVDFNSVDVKTRQGNNWVKTGSINPSVIITGPRE |
| | | NIIDPETSTFKLTNNTFAAQEGFGALSIISISPRFMLTYSNATNDVGEGRFSKSE |
| | | FCMDPILILMHELNHAMHNLYGIAIPNDQTISSVTSNIFYSQYNVKLEYAEIYA |
| | | FGGPTIDLIPKSARKYFEEKALDYYRSIAKRLNSITTANPSSFNKYIGEYKQKLI |
| | | RKYRFVVESSGEVTVNRNKFVELYNELTQIFTEFNYAKIYNVQNRKIYLSNVY |
| | | TPVTANILDDNVYDIQNGFNIPKSNLNVLFMGQNLSRNPALRKVNPENMLYL |
| | | FTKFCHKAIDGRSLYNKTLDCRELLVKNTDLPFIGDISDVKTDIFLRKDINEET |
| | | EVIYYPDNVSVDQVILSKNTSEHGQLDLLYPSIDSESEILPGENQVFYDNRTQN |
| | | VDYLNSYYYLESQKLSDNVEDFTFTRSIEEALDNSAKVYTYFPTLANKVNAG |
| | | VQGGLFLMWANDVVEDFTTNILRKDTLDKISDVSAIIPYIGPALNISNSVRRGN |
| | | FTEAFAVTGVTILLEAFPEFTIPALGAFVIYSKVQERNEIIKTIDNCLEQRIKRW |
| | | KDSYEWMMGTWLSRIITQFNNISYQMYDSLNYQAGAIKAKIDLEYKKYSGSD |
| | | KENIKSQVENLKNSLDVKISEAMNNINKFIRECSVTYLFKNMLPKVIDELNEF |
| | | DRNTKAKLINLIDSHNIILVGEVDKLKAKVNNSFQNTIPFNIFSYTNNSLLKDII |
| | | NEYFNNINDSKILSLQNRKNTLVDTSGYNAEVSEEGDVQLNPIFPFDFKLGSSG |
| | | EDRGKVIVTQNENIVYNSMYESFSISFWIRINKWVSNLPGYTIIDSVKNNSGWS |
| | | IGIISNFLVFTLKQNEDSEQSINFSYDISNNAPGYNKWFFVTVTNNMMGNMKI |
| | | YINGKLIDTIKVKELTGINFSKTITFEINKIPDTGLITSDSDNINMWIRDFYIFAKE |
| | | LDGKDINILFNSLQYTNVVKDYWGNDLRYNKEYYMVNIDYLNRYMYANSR |
| | | QIVFNTRRNNNDFNEGYKIIIKRIRGNTNDTRVRGGDILYFDMTINNKAYNLF |
| | | MKNETMYADNHSTEDIYAIGLREQTKDINDNIIFQIQPMNNTYYYASQIFKSN |
| | | FNGENISGICSIGTYRFRLGGDWYRHNYLVPTVKQGNYASLLESTSTHWGFVP |
| | | VSEBoNT/DMTWPVKDFNYSDPVNDNDILYLRIPQNKLITTPVKAFMITQNIW |
| | | VIPERFSSDTNPSLSKPPRPTSKYQSYYDPSYLSTDEQKDTFLKGIIKLFKRINE |
| | | RDIGKKLINYLVVGSPFMGDSSTPEDTFDFTRHTTNIAVEKFENGSWKVTNIIT |
| | | PSVLIFGPLPNILDYTASLTLQGQQSNPSFEGFGTLSILKVAPEFLLTFSDVTSN |
| | | QSSAVLGKSIFCMDPVIALMHELTHSLHQLYGINIPSDKRIRPQVSEGFFSQDG |
| | | PNVQFEELYTFGGLDVEIIPQIERSQLREKALGHYKDIAKRLNNINKTIPSSWIS |
| | | NIDKYKKIFSEKYNFDKDNTGNFVVNIDKFNSLYSDLTNVMSEVVYSSQYNV |
| | | KNRTHYFSRHYLPVFANILDDNIYTIRDGFNLTNKGFNIENSGQNIERNPALQK |
| | | LSSESVVDLFTKVCLRLTKNSRDDSTCIKVKNNRLPYVADKDSISQEIFENKIIT |
| | | DETNVQNYSDKFSLDESILDGQVPINPEIVDPLLPNVNMEPLNLPGEEIVFYDD |
| | | ITKYVDYLNSYYYLESQKLSNNVENITLTTSVEEALGYSNKIYTFLPSLAEKV |
| | | NKGVQAGLFLNWANEVVEDFTTNIMKKDTLDKISDVSVIIPYIGPALNIGNSA |
| | | LRGNFNQAFATAGVAFLLEGFPEFTIPALGVFTFYSSIQEREKIIKTIENCLEQR |
| | | VKRWKDSYQWMVSNWLSRITTQFNHINYQMYDSLSYQADAIKAKIDLEYKK |
| | | YSGSDKENIKSQVENLKNSLDVKISEAMNNINKFIRECSVTYLFKNMLPKVID |
| | | ELNKFDLRTKTELINLIDSHNIILVGEVDRLKAKVNESFENTMPFNIFSYTNNSL |
| | | LKDIINEYFNSINDSKILSLQNKKNALVDTSGYNAEVRVGDNVQLNTIYTNDF |
| | | KLSSSGDKIIVNLNNNILYSAIYENSSVSFWIKISKDLTNSHNEYTIINSIEQNSG |
| | | WKLCIRNGNIEWILQDVNRKYKSLIFDYSESLSHTGYTNKWFFVTITNNIMGY |
| | | MKLYINGELKQSQKIEDLDEVKLDKTIVFGIDENIDENQMLWIRDFNIFSKELS |
| | | NEDINIVYEGQILRNVIKDYWGNPLKFDTEYYIINDNYIDRYIAPESNVLVLVQ |
| | | YPDRSKLYTGNPITIKSVSDKNPYSRILNGDNIILHMLYNSRKYMIIRDTDTIYA |
| | | TQGGECSQNCVYALKLQSNLGNYGIGIFSIKNIVSKNKYCSQIFSSFRENTMLL |
| | | ADIYKPWRFSFKNAYTPVAVTNYETKLLSTSSFWKFISRDPGWVE |
| 136 | BoNT/E (x62683) | MPKINSFNYNDPVNDRTILYIKPGGCQEFYKSFNIMKNIWIIPERNVIGTTPQDF |
| | | HPPTSLKNGDSSYYDPNYLQSDEEKDRFLKIVTKIFNRINNNLSGGILLEELSK |
| | | ANPYLGNDNTPDNQFHIGDASAVEIKFSNGSQDILLPNVIIMGAEPDLFETNSS |
| | | NISLRNNYMPSNHGFGSIAIVTFSPEYSFRFNDNSMNEFIQDPALTLMHELIHSL |
| | | HGLYGAKGITTKYTITQKQNPLITNIRGTNIEEFLTFGGTDLNIITSAQSNDIYT |
| | | NLLADYKKIASKLSKVQVSNPLLNPYKDVFEAKYGLDKDASGIYSVNINKFN |
| | | DIFKKLYSFTEFDLATKFQVKCRQTYIGQYKYFKLSNLLNDSIYNISEGYNINN |
| | | LKVNFRGQNANLNPRIITPITGRGLVKKIIRFCKNIVSVKGIRKSICIEINNGELF |
| | | FVASENSYNDDNINTPKEIDDTVTSNNNYENDLDQVILNFNSESAPGLSDEKL |
| | | NLTIQNDAYIPKYDSNGTSDIEQHDVNELNVFFYLDAQKVPEGENNVNLTSSI |
| | | DTALLEQPKIYTFFSSEFINNVNKPVQAALFVSWIQQVLVDFTTEANQKSTVD |
| | | KIADISIVVPYIGLALNIGNEAQKGNFKDALELLGAGILLEFEPELLIPTILVFTI |
| | | KSFLGSSDNKNKVIKAINNALKERDEKWKEVYSFIVSNWMTKINTQFNKRKE |
| | | QMYQALQNQVNAIKTIIESKYNSYTLEEKNELTNKYDIKQIENELNQKVSIAM |
| | | NNIDRFLTESSISYLMKLINEVKINKLREYDENVKTYLLNYIIQHGSILGESQQE |
| | | LNSMVTDTLNNSIPFKLSSYTDDKILISYFNKFFKRIKSSSVLNMRYKNDKYV |
| | | DTSGYDSNININGDVYKYPTNKNQFGIYNDKLSEVNISQNDYIIYDNKYKNFSI |
| | | SFWVRIPNYDNKIVNVNNEYTIINCMRDNNSGWKVSLNHNEIIWTLQDNAGI |
| | | NQKLAFNYGNANGISDYINKWIFVTITNDRLGDSKLYINGNLIDQKSILNLGNI |
| | | HVSDNILFKIVNCSYTRYIGIRYFNIFDKELDETEIQTLYSNEPNTNILKDFWGN |
| | | YLLYDKEYYLLNVLKPNNFIDRRKDSTLSINNIRSTILLANRLYSGIKVKIQRV |
| | | NNSSTNDNLVRKNDQVYINFVASKTHLFPLYADTATTNKEKTIKISSSGNRFN |
| | | QVVVMNSVGNNCTMNFKNNNGNNIGLLGFKADTVVASTWYYTHMRDHTN |
| | | SNGCFWNFISEEHGWQEK |
| 137 | BoNT/F | MPVVINSFNYNDPVNDDTILYMQIPYEEKSKKYYKAFEIMRNVWIIPERNTIG |
| | | TDPSDFDPPASLENGSSAYYDPNYLTTDAEKDRYLKTTIKLFKRINSNPAGEV |
| | | LLQEISYAKPYLGNEHTPINEFHPVTRTTSVNIKSSTNVKSSIILNLLVLGAGPDI |
| | | FENSSYPVRKLMDSGGVYDPSNDGFGSINIVTFSPEYEYTFNDISGGYNSSTES |
| | | FIADPAISLAHELIHALHGLYGARGVTYKETIKVKQAPLMIAEKPIRLEEFLTF |
| | | GGQDLNIITSAMKEKIYNNLLANYEKIATRLSRVNSAPPEYDINEYKDYFQWK |
| | | YGLDKNADGSYTVNENKFNEIYKKLYSFTEIDLANKFKVKCRNTYFIKYGFL |
| | | KVPNLLDDDIYTVSEGFNIGNLAVNNRGQNIKLNPKIIDSIPDKGLVEKIVKFC |
| | | KSVIPRKGTKAPPRLCIRVNNRELFFVASESSYNENDINTPKEIDDTTNLNNNY |
| | | RNNLDEVILDYNSETIPQISNQTLNTLVQDDSYVPRYDSNGTSEIEEHNVVDL |
| | | NVFFYLHAQKVPEGETNISLTSSIDTALSEESQVYTFFSSEFINTINKPVHAALFI |
| | | SWINQVIRDFTTEATQKSTFDKIADISLVVPYVGLALNIGNEVQKENFKEAFEL |
| | | LGAGILLEFVPELLIPTILVFTIKSFIGSSENKNKIIKAINNSLMERETKWKEIYS |
| | | WIVSNWLTRINTQFNKRKEQMYQALQNQVDAIKTVIEYKYNNYTSDERNRL |
| | | ESEYNINNIREELNKKVSLAMENIERFITESSIFYLMKLINEAKVSKLREYDEG |
| | | VKEYLLDYISEHRSILGNSVQELNDLVTSTLNNSIPFELSSYTNDKILILYFNKL |
| | | YKKIKDNSILDMRYENNKFIDISGYGSNISINGDVYIYSTNRNQFGIYSSKPSEV |
| | | NIAQNNDIIYNGRYQNFSISFWVRIPKYFNKVNLNNEYTIIDCIRNNNSGWKIS |
| | | LNYNKIIWTLQDTAGNNQKLVFNYTQMISISDYINKWIFVTITNNRLGNSRIYI |
| | | NGNLIDEKSISNLGDIHVSDNILFKIVGCNDTRYVGIRYFKVFDTELGKTEIETL |
| | | YSDEPDPSILKDFWGNYLLYNKRYYLLNLLRTDKSITQNSNFLNINQQRGVY |
| | | QKPNIFSNTRLYTGVEVIIRKNGSTDISNTDNFVRKNDLAYINVVDRDVEYRL |
| | | YADISIAKPEKIIKLIRTSNSNNSLGQIIVMDSIGNNCTMNFQNNNGGNIGLLGF |
| | | HSNNLVASSWYYNNIRKNTSSNGCFWSFISKEHGWQEN |
| 138 | BoNT/G (x74162) | MPVNIKXFNYNDPINNDDIIMMEPFNDPGPGTYYKAFRIIDRIWIVPERFTYGF |
| | | QPDQFNASTGVFSKDVYEYYDPTYLKTDAEKDKFLKTMIKLFNRINSKPSGQ |
| | | RLLDMIVDAIPYLGNASTPPDKFAANVANVSINKKIIQPGAEDQIKGLMTNLII |
| | | FGPGPVLSDNFTDSMIMNGHSPISEGFGARMMIRFCPSCLNVFNNVQENKDTS |
| | | IFSRRAYFADPALTLMHELIHVLHGLYGIKISNLPITPNTKEFFMQHSDPVQAE |
| | | ELYTFGGHDPSVISPSTDMNIYNKALQNFQDIANRLNIVSSAQGSGIDISLYKQI |
| | | YKNKYDFVEDPNGKYSVDKDKFDKLYKALMFGFTETNLAGEYGIKTRYSYF |
| | | SEYLPPIKTEKLLDNTIYTQNEGFNIASKNLKTEFNGQNKAVNKEAYEEISLEH |
| | | LVIYRIAMCKPVMYKNTGKSEQCIIVNNEDLFFIANKDSFSKDLAKAETIAYN |
| | | TQNNTIENNFSIDQLILDNDLSSGIDLPNENTEPFTNFDDIDIPVYIKQSALKKIF |
| | | VDGDSLFEYLHAQTFPSNIENLQLTNSLNDALRNNNKVYTFFSTNLVEKANT |
| | | VVGASLFVNWVKGVIDDFTSESTQKSTIDKVSDVSIIIPYIGPALNVGNETAKE |
| | | NFKNAFEIGGAAILMEFIPELIVPIVGFFTLESYVGNKGHIIMTISNALKKRDQK |
| | | WTDMYGLIVSQWLSTVNTQFYTIKERMYNALNNQSQAIEKIIEDQYNRYSEE |
| | | DKMNINIDFNDIDFKLNQSINLAINNIDDFINQCSISYLMNRMIPLAVKKLKDF |
| | | DDNLKRDLLEYIDTNELYLLDEVNILKSKVNRHLKDSIPFDLSLYTKDTILIQV |
| | | FNNYISNISSNAILSLSYRGGRLIDSSGYGATMNVGSDVIFNDIGNGQFKLNNS |
| | | ENSNITAHQSKFVVYDSMFDNFSINFWVRTPKYNNNDIQTYLQNEYTIISCIKN |
| | | DSGWKVSIKGNRIIWTLIDVNAKSKSIFFEYSIKDNISDYINKWFSITITNDRLG |
| | | NANIYINGSLKKSEKILNLDRINSSNDIDFKLINCTDTTKFVWIKDFNIFGRELN |
| | | ATEVSSLYWIQSSTNTLKDFWGNPLRYDTQYYLFNQGMQNIYIKYFSKASMG |
| | | ETAPRTNFNNAAINYQNLYLGLRFIIKKASNSRNINNDNIVREGDYIYLNIDNIS |
| | | DESYRVYVLVNSKEIQTQLFLAPINDDPTFYDVLQIKKYYEKTTYNCQILCEK |
| | | DTKTFGLFGIGKFVKDYGYVWDTYDNYFCISQWYLRRISENINKLRLGCNWQ |
| | | FIPVDEGWTE |
| 139 | BoNT/H (F/A, | MPVVINSFNYDDPVNDNTIIYIRPPYYETSNTYFKAFQIMDNVWIIPERYRLGI |
| | WP_047402807.1) | DPSLFNPPVSLKAGSDGYFDPNYLSTNTEKNKYLQIMIKLFKRINSKPAGQILL |
| | | EEIKNAIPYLGNSYTQEEQFTTNNRTVSFNVKLANGNIVQQMANLIIWGPGPD |
| | | LTTNKTGGIIYSPYQSMEATPYKDGFGSIMTVEFSPEYATAFNDISIASHSPSLFI |
| | | KDPALILMHELIHVLHGLYGTYITEYKITPNVVQSYMKVTKPITSAEFLTFGGR |
| | | DRNIVPQSIQSQLYNKVLSDYKRIASRLNKVNTATALINIDEFKNLYEWKYQF |
| | | AKDSNGVYSVDLNKFEQLYKKIYSFTEFNLAYEFKIKTRLGYLAENFGPFYLP |
| | | NLLDDSIYTEVDGFNIGALSINYQGQNIGSDINSIKKLQGQGVVSRVVRLCSNS |
| | | NTKNSLCITVNNRDLFFIASQESYGENTINTYKEIDDTTTLDPSFEDILDKVILN |
| | | FNEQVIPQMPNRNVSTDIQKDNYIPKYDYNRTDIIDSYEVGRNYNTFFYLNAQ |
| | | KFSPNESNITLTSSFDTGLLEGSKVYTFFSSDFINNINKPVQALLFIEWVKQVIR |
| | | DFTTEATKTSTVDKLKDISLVVPYIGLALNIGDEIYKQHFAEAVELVGAGLLL |
| | | EFSPEFLIPTLLIFTIKGYLTGSIRDKDKIIKTLDNALNVRDQKWKELYRWVVS |
| | | KWLTTINTQFNKRKEQMYKALKNQATAIKKIIENKYNNYTTDEKSKIDSSYNI |
| | | NEIERTLNEKINLAMKNIEQFITESSIAYLINIINNETIQKLKSYDDLVRRYLLGY |
| | | IRNHSSILGNSVEELNSKVNNHLDNGIPFELSSYTNDSLLIRYFNKNYGELKYN |
| | | CILNIKYEMDRDKLVDSSGYRSRINIGTGVKFSEIDKNQVQLSNLESSKIEVILN |
| | | NGVIYNSMYENFSTSFWIRIPKYFRNINNEYKIISCMQNNSGWEVSLNFSNMN |
| | | SKIIWTLQDTEGIKKTVVFQYTQNINISDYINRWIFVTITNNRLSNSKIYINGRLI |
| | | NEESISDLGNIHASNNIMFKLDGCRDPHRYIWIKYFNLFDKELNKKEIKDLYD |
| | | NQSNSGILKDFWGDYLQYDKPYYMLNLYDPNKYLDVNNVGIRGYMYLKGP |
| | | RGRIVTTNIYLNSTLYMGTKFIIKKYASGNKDNIVRNNDRVYINVVVKNKEYR |
| | | LATNASQAGVEKILSAVEIPDVGNLSQVVVMKSENDQGIRNKCKMNLQDNN |
| | | GNDIGFIGFHQFNNIAKLVASNWYNRQIGKASRTFGCSWEFIPVDDGWGESSL |

[0061] Some of the embodiments, advantages, features, and uses of the technology disclosed herein will be more fully understood from the Examples below. The Examples are intended to illustrate some of the benefits of the present disclosure and to describe particular embodiments, but are not intended to exemplify the full scope of the disclosure and, accordingly, do not limit the scope of the disclosure.

### EXAMPLES

[0062] C. botulinum is a gram-positive bacterium, which is evolutionary close to the model bacterium Bacillus subtilis, but is genetically far away from E. coli (FIG. 1). In this study, the possibility of expressing BoNTs in Bacillus is explored. There are a couple of advantages by using Bacillus as the expression hosts as follows: (1) Bacillus species are evolutionarily much closer to C. botulinum, the natural host of BoNTs. Therefore Bacillus species are likely to provide better inner environment for protein translation and coupled folding for these toxins. A known example is that TcdA/B toxins can be well expressed in Bacillus megaterium but not in E. coli. (2) B. subtilis is a well-studied model organism for bacteria; genetic manipulations are highly amendable in this bacterial species. Therefore, protein engineering would be feasible when using this bacterium as a host. (3) The cost of cell culture and protein purification when using B. subtilis is relatively low. Thus this system is very suitable for large scale protein production. (4) B. subtilis is known as a common gut commensal in humans and normally considered as a GRAS (general recognized as safe) organism. The Food and Drug Administration (FDA) stated that protein products from the nontoxigenic and nonpathogenic strains of B. subtilis are widely available and have been safely used in a variety of food applications. Products that have been successfully produced in Bacillus bacterium include amylase, hyaluronic acid, polyhdroxyalkanoates, and many antibiotics. Due to the unpredictability in the recombinant protein expression techniques, whether intact and active BoNTs can be produced with high yield in Bacillus remains to be tested.

### Results:

[0063] The crystal structure of full-length BoNT/A, BoNT/B and BoNT/E have been solved previously, giving an overall view of these molecules. Not many disulfide bonds were found within these 150-kd molecules, suggesting an oxidative environment or additional oxidative cofactors are not essential for the production of BoNTs; which is expected, because C. botulinum is an anaerobic bacterium. The surface distribution of the hydrophobic and hydrophilic residues are relatively even across these toxins like BoNT/A and BoNT/B (FIGS. 2A to 2B).

[0064] iBoNT/B (“i” refers to the inactive form, which contains R370A/Y373F mutations at its enzymatic domain) was used as an example of BoNTs and the express pattern of it in E. coli was analyzed. Generally, very few products were obtained using E. coli, despite varying the expression conditions including growth temperature, inducer concentration, and culture medium. Therefore, the low yield of iBoNT/B in E. coli could be mainly because of the intrinsic defect of the host. To validate this, iBoNT/B fused with either N-terminal or C-terminal His-tag was expressed in E. coli. A large amount of the iBoNT/B products in the cell lysate were presented as shorter fragments wherever the tag was attached. For C-terminal tagged iBoNT/B, purification by Ni-NTA beads removed the majority of the shorter fragments. In contrast, all fragments of N-terminal tagged iBoNT/B remained after IMAC purification (FIG. 3). These results indicate the low yield of iBoNT/B in E. coli was mainly caused by unexpected early terminations during the translation.

[0065] Next, the expression pattern of iBoNT/B was analyzed in B. subtilis by Western-blot. Unlike in E. coli, the majority of the expressed iBoNT/B existed as integrate full-length protein (FIGS. 4A to 4B). As a rough estimation, ˜5-10 mg protein can be obtained from one litter LB cultured B. subtilis; while usually the yield is <0.5 mg/L culture when expressed in E. coli. The same phenotype was also obtained when the expression of a chimeric iBoNT/AB was tested, which contains an iBoNT/A catalytic domain, a BoNT/A translocation domain, and a BoNT/B binding domain, in E. coli or B. subtilis (data not shown). These results demonstrate that B. subtilis is overall a better expression host for BoNTs expression.

[0066] Next, the expression plasmids for other botulinum neurotoxins including iBoNT/A, iBoNT/C, iBoNT/D were created, and the expression of those proteins were tested in B. subtilis. As expected, all of these proteins were able to be produced in B. subtilis with decent yields (FIG. 5).

### SUMMARY

[0067] Here, a new protocol has been developed to express full-length BoNTs in B. subtilis with improved protein quality and yield. This protocol could be used to produce full-length BoNTs and their variants for scientific study, to produce active toxins for medical therapy or cosmetics, and to develop natural/recombinant toxoids vaccines.

### EQUIVALENTS AND SCOPE

[0068] Those skilled in the art will recognize, or be able to ascertain using no more than routine experimentation, many equivalents of the embodiments described herein. The scope of the present disclosure is not intended to be limited to the above description, but rather is as set forth in the appended claims.

[0069] Articles such as “a,” “an,” and “the” may mean one or more than one unless indicated to the contrary or otherwise evident from the context. Claims or descriptions that include “or” between two or more members of a group are considered satisfied if one, more than one, or all of the group members are present, unless indicated to the contrary or otherwise evident from the context. The disclosure of a group that includes “or” between two or more group members provides embodiments in which exactly one member of the group is present, embodiments in which more than one members of the group are present, and embodiments in which all of the group members are present. For purposes of brevity those embodiments have not been individually spelled out herein, but it will be understood that each of these embodiments is provided herein and may be specifically claimed or disclaimed.

[0070] It is to be understood that the disclosure encompasses all variations, combinations, and permutations in which one or more limitation, element, clause, or descriptive term, from one or more of the claims or from one or more relevant portion of the description, is introduced into another claim. For example, a claim that is dependent on another claim can be modified to include one or more of the limitations found in any other claim that is dependent on the same base claim. Furthermore, where the claims recite a composition, it is to be understood that methods of making or using the composition according to any of the methods of making or using disclosed herein or according to methods known in the art, if any, are included, unless otherwise indicated or unless it would be evident to one of ordinary skill in the art that a contradiction or inconsistency would arise.

[0071] Where elements are presented as lists, e.g., in Markush group format, it is to be understood that every possible subgroup of the elements is also disclosed, and that any element or subgroup of elements can be removed from the group. It is also noted that the term “comprising” is intended to be open and permits the inclusion of additional elements or steps. It should be understood that, in general, where an embodiment, product, or method is referred to as comprising particular elements, features, or steps, embodiments, products, or methods that consist, or consist essentially of, such elements, features, or steps, are provided as well. For purposes of brevity those embodiments have not been individually spelled out herein, but it will be understood that each of these embodiments is provided herein and may be specifically claimed or disclaimed.

[0072] Where ranges are given, endpoints are included. Furthermore, it is to be understood that unless otherwise indicated or otherwise evident from the context and/or the understanding of one of ordinary skill in the art, values that are expressed as ranges can assume any specific value within the stated ranges in some embodiments, to the tenth of the unit of the lower limit of the range, unless the context clearly dictates otherwise. For purposes of brevity, the values in each range have not been individually spelled out herein, but it will be understood that each of these values is provided herein and may be specifically claimed or disclaimed. It is also to be understood that unless otherwise indicated or otherwise evident from the context and/or the understanding of one of ordinary skill in the art, values expressed as ranges can assume any subrange within the given range, wherein the endpoints of the subrange are expressed to the same degree of accuracy as the tenth of the unit of the lower limit of the range.

[0073] Where websites are provided, URL addresses are provided as non-browser-executable codes, with periods of the respective web address in parentheses. The actual web addresses do not contain the parentheses.

[0074] In addition, it is to be understood that any particular embodiment of the present disclosure may be explicitly excluded from any one or more of the claims. Where ranges are given, any value within the range may explicitly be excluded from any one or more of the claims. Any embodiment, element, feature, application, or aspect of the compositions and/or methods of the disclosure, can be excluded from any one or more claims. For purposes of brevity, all of the embodiments in which one or more elements, features, purposes, or aspects is excluded are not set forth explicitly herein.

The application's sequence listing, which the Patent Office published only in electronic form, follows.

SEQUENCE LISTING (139 sequences)

SEQ ID NO: 1 - protein, 1291 aa, Clostridium botulinum
MPVTINNFNYNDPIDNNNIIMMEPPFARGTGRYYKAFKITDRIWIIPERYTFGYKPEDFNKSSGIFNRDVCEYYDPDYLNTNDKKNIFLQTMIKLFNRIKSKPLGEKLLEMIINGIPYLGDRRVPLEEFNTNIASVTVNKLISNPGEVERKKGIFANLIIFGPGPVLNENETIDIGIQNHFASREGFGGIMQMKFCPEYVSVFNNVQENKGASIFNRRGYFSDPALILMHELIHVLHGLYGIKVDDLPIVPNEKKFFMQSTDAIQAEELYTFGGQDPSIITPSTDKSIYDKVLQNFRGIVDRLNKVLVCISDPNININIYKNKFKDKYKFVEDSEGKYSIDVESFDKLYKSLMFGFTETNIAENYKIKTRASYFSDSLPPVKIKNLLDNEIYTIEEGFNISDKDMEKEYRGQNKAINKQAYEEISKEHLAVYKIQMCKSVKAPGICIDVDNEDLFFIADKNSFSDDLSKNERIEYNTQSNYIENDFPINELILDTDLISKIELPSENTESLTDFNVDVPVYEKQPAIKKIFTDENTIFQYLYSQTFPLDIRDISLTSSFDDALLFSNKVYSFFSMDYIKTANKVVEAGLFAGWVKQIVNDFVIEANKSNTMDKIADISLIVPYIGLALNVGNETAKGNFENAFEIAGASILLEFIPELLIPVVGAFLLESYIDNKNKIIKTIDNALTKRNEKWSDMYGLIVAQWLSTVNTQFYTIKEGMYKALNYQAQALEEIIKYRYNIYSEKEKSNINIDFNDINSKLNEGINQAIDNINNFINGCSVSYLMKKMIPLAVEKLLDFDNTLKKNLLNYIDENKLYLIGSAEYEKSKVNKYLKTIMPFDLSIYTNDTILIEMFNKYNSEILNNIILNLRYKDNNLIDLSGYGAKVEVYDGVELNDKNQFKLTSSANSKIRVTQNQNIIFNSVFLDFSVSFWIRIPKYKNDGIQNYIHNEYTIINCMKNNSGWKISIRGNRIIWTLIDINGKTKSVFFEYNIREDISEYINRWFFVTITNNLNNAKIYINGKLESNTDIKDIREVIANGEIIFKLDGDIDRTQFIWMKYFSIFNTELSQSNIEERYKIQSYSEYLKDFWGNPLMYNKEYYMFNAGNKNSYIKLKKDSPVGEILTRSKYNQNSKYINYRDLYIGEKFIIRRKSNSQSINDDIVRKEDYIYLDFFNLNQEWRVYTYKYFKKEEEKLFLAPISDSDEFYNTIQIKEYDEQPTYSCQLLFKKDEESTDEIGLIGIHRFYESGIVFEEYKDYFCISKWYLKEVKRKPYNLKLGCNWQFIPKDEGWTE

SEQ ID NO: 2 - protein, 1291 aa, Clostridium botulinum
MPVTINNFNYNDPIDNNNIIMMEPPFARGTGRYYKAFKITDRIWIIPERYTFGYKPEDFNKSSGIFNRDVCEYYDPDYLNTNDKKNIFLQTMIKLFNRIKSKPLGEKLLEMIINGIPYLGDRRVPLEEFNTNIASVTVNKLISNPGEVERKKGIFANLIIFGPGPVLNENETIDIGIQNHFASREGFGGIMQMKFCPEYVSVFNNVQENKGASIFNRRGYFSDPALILMHELIHVLHGLYGIKVDDLPIVPNEKKFFMQSTDAIQAEELYTFGGQDPSIITPSTDKSIYDKVLQNFRGIVDRLNKVLVCISDPNININIYKNKFKDKYKFVEDSEGKYSIDVESFDKLYKSLMFGFTETNIAENYKIKTRASYFSDSLPPVKIKNLLDNEIYTIEEGFNISDKNMEKEYRGQNKAINKQAYEEISKEHLAVYKIQMCKSVRAPGICIDVDNEDLFFIADKNSFSDDLSKNERIEYDTQSNYIENRSSIDELILDTNLISKIELPSENTESLTDFNVDVPVYEKQPAIKKIFTDENTIFQYLYSQTFPLDIRDISLTSSFDDALLFSNKVYSFFSMDYIKTANKVVEAGLFAGWVKQIVDDFVIEANKSSTMDKIADISLIVPYIGLALNVGNETAKGNFENAFEIAGASILLEFIPELLIPVVGAFLLESYIDNKNKIIKTIDNALTKRDEKWIDMYGLIVAQWLSTVNTQFYTIKEGMYKALNYQAQALEEIIKYKYNIYSEKEKSNINIDFNDINSKLNEGINQAVDNINNFINECSVSYLMKKMIPLAVEKLLDFDNTLKKNLLNYIDENKLYLIGSAEYEKSKVDKHLKTIIPFDLSMYTNNTILIEIFNKYNSEILNNIILNLRYRDNNLIDLSGYGANVEVYDGVELNDKNQFKLTSSTNSEIRVTQNQNIIFNSMFLDFSVSFWIRIPKYKNDGIQNYIHNEYTIINCIKNNSGWKISIRGNRIIWTLTDINGKTKSVFFEYSIREDISDYINRWFFVTITNNSDNAKIYINGKLESNIDIKDIGEVIANGEIIFKLDGDIDRTQFIWMKYFSIFNTELSQSNIKEIYKIQSYSEYLKDFWGNPLMYNKEYYMFNAGNKNSYIKLKKDSSVGEILTRSKYNQNSNYINYRNLYIGEKFIIRRKSNSQSINDDIVRKEDYIYLDFFNSNREWRVYAYKDFKEEEKKLFLANIYDSNEFYKTIQIKEYDEQPTYSCQLLFKKDEESTDEIGLIGIHRFYESGIVLKDYKNYFCISKWYLKEVKRKPYNPNLGCNWQFIPKDEGWIE

SEQ ID NO: 3 - protein, 1291 aa, Clostridium botulinum
MPVTINNFNYNDPIDNDNIIMMEPPFARGTGRYYKAFKITDRIWIIPERYTFGYKPEDFNKSSGIFNRDVCEYYDPDYLNTNDKKNIFLQTMIKLFNRIKSKPLGEKLLEMIINGIPYLGDRRVPLEEFNTNIASVTVNKLISNPGEVERKKGIFANLIIFGPGPVLNENETIDIGIQNHFASREGFGGIMQMKFCPEYVSVFNNVQENKGASIFNRRGYFSDPALILMHELIHVLHGLYGIKVDDLPIVPNEKKFFMQSTDAIQAEELYTFGGQDPRIITPSTDKSIYDKVLQNFRGIVDRLNKVLVCISDPNININIYKNKFKDKYKFVEDSEGKYSIDVESFDKLYKSLMFGFTETNIAENYKIKTRASYFSDSLPPVKIKNLLDNEIYTIEEGFNISDKNMEKEYRGQNKAINKQAYEEISKEHLAVYKIQMCKSVRAPGICIDVDNEDLFFIADKNSFSDDLSKNERIEYDTQSNYIENRSSIDELILDTNLISKIELPSENTESLTDFNVDVPVYEKQPAIKKIFTDENTIFQYLYSQTFPLDIRDISLTSSFDDALLFSNKVYSFFSMDYIKTANKVVEAGLFAGWVKQIVDDFVIEANKSSTMDKIADISLIVPYIGLALNVGNETAKGNFENAFEIAGASILLEFIPELLIPVVGAFLLESYIDNKNKIIKTIDNALTKRDEKWIDMYGLIVAQWLSTVNTQFYTIKEGMYKALNYQAQALEEIIKYKYNIYSEKEKSNINIDFNDINSKLNEGINQAIDNINNFINECSVSYLMKKMIPLAVEKLLDFDNTLKKNLLNYIDENKLYLIGSAEYEKSKVDKHLKTIIPFDLSMYTNNTILIEIFNKYNSEILNNIILNLRYRDNNLIDLSGYGAKVEVYNGVELNDKNQFKLTSSANSKIRVTQNQDIIFNSMFLDFSVSFWIRIPKYKNDGIQNYIHNEYTIINCIKNNSGWKISIRGNKIIWTLTDINGKTKSVFFEYSIRKDVSEYINRWFFVTITNNSDNAKIYINGKLESNIDIKDIGEVIANGEIIFKLDGDIDRTQFIWMKYFSIFNTELSQSNIKEIYKIQSYSEYLKDFWGNPLMYNKEYYMFNAGNKNSYIKLKKDSSVGEILTRSKYNQNSNYINYRNLYIGEKFIIRRKSNSQSINDDIVRKEDYIYLDFFNLNQEWRVYAYKDFKKKEEKLFLANIYDSNEFYNTIQIKEYDEQPTYSCQLLFKKDEESTDEIGLIGIHRFYESGIVFKDYKDYFCISKWYLKEVKRKPYNPNLGCNWQFIPKDEGWIE

SEQ ID NO: 4 - protein, 1291 aa, Clostridium botulinum
MPVTINNFNYNDPIDNDNIIMMEPPFARGTGRYYKAFKITDRIWIIPERYTFGYKPEDFNKSSGIFNRDVCEYYDPDYLNTNDKKNIFLQTMIKLFNRIKSKPLGEKLLEMIINGIPYLGDRRVPLEEFNTNIASVTVNKLISNPGEVEQKKGIFANLIIFGPGPVLNENETIDIGIQNHFASREGFGGIMQMKFCPEYVSVFNNVQENKGASIFNRRGYFSDPALILMHELIHVLHGLYGIKVDDLPIVPNEKKFFMQSTDTIQAEELYTFGGQDPSIISPSTDKSIYDKVLQNFRGIVDRLNKVLVCISDPNININIYKNKFKDKYKFVEDSEGKYSIDVESFNKLYKSLMFGFTEINIAENYKIKTRASYFSDSLPPVKIKNLLDNEIYTIEEGFNISDKNMGKEYRGQNKAINKQAYEEISKEHLAVYKIQMCKSVKVPGICIDVDNENLFFIADKNSFSDDLSKNERVEYNTQNNYIGNDFPINELILDTDLISKIELPSENTESLTDFNVDVPVYEKQPAIKKVFTDENTIFQYLYSQTFPLNIRDISLTSSFDDALLVSSKVYSFFSMDYIKTANKVVEAGLFAGWVKQIVDDFVIEANKSSTMDKIADISLIVPYIGLALNVGDETAKGNFESAFEIAGSSILLEFIPELLIPVVGVFLLESYIDNKNKIIKTIDNALTKRVEKWIDMYGLIVAQWLSTVNTQFYTIKEGMYKALNYQAQALEEIIKYKYNIYSEEEKSNININFNDINSKLNDGINQAMDNINDFINECSVSYLMKKMIPLAVKKLLDFDNTLKKNLLNYIDENKLYLIGSVEDEKSKVDKYLKTIIPFDLSTYTNNEILIKIFNKYNSEILNNIILNLRYRDNNLIDLSGYGAKVEVYDGVKLNDKNQFKLTSSADSKIRVTQNQNIIFNSMFLDFSVSFWIRIPKYRNDDIQNYIHNEYTIINCMKNNSGWKISIRGNRIIWTLIDINGKTKSVFFEYNIREDISEYINRWFFVTITNNLDNAKIYINGTLESNMDIKDIGEVIVNGEITFKLDGDVDRTQFIWMKYFSIFNTQLNQSNIKEIYKIQSYSEYLKDFWGNPLMYNKEYYMFNAGNKNSYIKLVKDSSVGEILIRSKYNQNSNYINYRNLYIGEKFIIRRKSNSQSINDDIVRKEDYIHLDFVNSNEEWRVYAYKNFKEQEQKLFLSIIYDSNEFYKTIQIKEYDEQPTYSCQLLFKKDEESTDDIGLIGIHRFYESGVLRKKYKDYFCISKWYLKEVKRKPYKSNLGCNWQFIPKDEGWTE

SEQ ID NO: 5 - protein, 1291 aa, Clostridium botulinum
MPVTINNFNYNDPIDNNNIIMMEPPFARGMGRYYKAFKITDRIWIIPERYTFGYKPEDFNKSSGIFNRDVCEYYDPDYLNTNDKKNIFLQTMIKLFNRIKSKPLGEKLLEMIINGIPYLGDRRVPLEEFNTNIASVTVNKLISNPGEVERKKGIFANLIIFGPGPVLNENETIDIGIQNHFASREGFGGIMQMKFCPEYVSVFNNVQENKGASIFNRRGYFSDPALILMHELIHVLHGLYGIKVNDLPIVPNEKKFFMQSTDAIQAEELYTFGGQDPSIISPSTDKSIYDKVLQNFRGIVDRLNKVLVCISDPNININIYKNKFKDKYKFVEDSEGKYSIDVESFDKLYKSLMFGFTETNIAENYKIKTRASYFSDSLPPVKIKNLLDNEIYTIEEGFNISDKNMEKEYRGQNKAINKQAYEEISKEHLAVYKIQMCKSVKAPGICIDVDNEDLFFIADKNSFSDDLSKNERIAYNTQNNYIENDFSINELILDTDLISKIELPSENTESLTDFNVYVPVYKKQPAIKKIFTDENTIFQYLYSQTFPLDIRDISLTSSFDDALLFSNKVYSFFSMDYIKTANKVVEAGLFAGWVKQIVDDFVIEANKSSTMDKIADISLIVPYIGLALNVGNETAKGNFENAFEIAGASILLEFIPELLIPVVGAFLLESYIDNKNKIIETINSALTKRDEKWIDMYGLIVAQWLSTVNTQFYTIKEGMYKALNYQAQALEEIIKYKYNIYSEKERSNINIDFNDVNSKLNEGINQAIDNINNFINECSVSYLMKKMIPLAVEKLLDFDNTLRKNLLNYIDENKLYLIGSAEYEKSKVDKYLKTSIPFDLSTYTNNTILIEIFNKYNSDILNNIILNLRYRDNKLIDLSGYGAKVEVYDGVKLNDKNQFKLTSSANSKIRVIQNQNIIFNSMFLDFSVSFWIRIPKYKNDGIQNYIHNEYTIINCMKNNSGWKISIRGNMIIWTLIDINGKIKSVFFEYSIKEDISEYINRWFFVTITNNSDNAKIYINGKLESHIDIRDIREVIANDEIIFKLDGNIDRTQFIWMKYFSIFNTELSQSNIEEIYKIQSYSEYLKDFWGNPLMYNKEYYMFNAGNKNSYIKLKKDSSVGEILTRSKYNQNSKYINYRDLYIGEKFIIRRKSNSQSINDDIVRKEDYIYLDFFNLNQEWRVYMYKYFKKEEEKLFLAPISDSDEFYNTIQIKEYDEQPTYSCQLLFKKDEESTDEIGLIGIHRFYESGIVFKEYKDYFCISKWYLKEVKRKPYNSKLGCNWQFIPKDEGWTE

SEQ ID NO: 6 - protein, 1291 aa, Clostridium botulinum
MPVTINNFNYNDPIDNNNIIMMEPPFARGTGRYYKAFKITDRIWIIPERYTFGYKPEDFNKSSGIFNRDVCEYYDPDYLNTNDKKNIFLQTMIKLFNRIKSKPLGEKLLEMIINGIPYLGDRRVPLEEFNTNIASVTVNKLISNPGEVERKKGIFANLIIFGPGPVLNENETIDIGIQNHFASREGFGGIMQMKFCPEYVSVFNNVQENKGASIFNRRGYFSDPALILMHELIHVLHGLYGIKVDDLPIVPNEKKFFMQSTDAIQAEELYTFGGQDPSIITPSTDKSIYDKVLQNFRGIVDRLNKVLVCISDPNININIYKNKFKDKYKFVEDSEGKYSIDVESFDKLYKSLMFGFTETNIAENYKIKTRASYFSDSLPPVKIKNLLDNEIYTIEEGFNISDKNMEKEYRGQNKAINKQAYEEISKEHLAVYKIQMCKSVRAPGICIDVDNEDLFFIADKNSFSDDLSKNERIEYDTQSNYIENRSSIDELILDTNLISKIELPSENTESLTDFNVDVPVYEKQPAIKKFFTDENTIFQYLYSQTFPLDIRDISLTSSFDDALLFSNKVYSFFSMDYIKTANKVVEAGLFAGWVKQIVDDFVIEANKSNTMDKLADISLIVPYIGLALNVGNETAKGNFENAFEIAGASILLEFIPELLIPVVGAFLLESYIDNKNKIIKTIDNALTKRDEKWRDMYGLIVAQWLSTVNTQFYTIKEGMYKALNYQAQALEEIIKYKYNIYSEKEKSNINIDFNDINSKLNEGINQAIDNINNFINECSVSYLMKKMIPLAVEKLLDFDNTLKKNLLNYIDENKLYLIGSAEYEKSKVDKHLKTIIPFDLSMYTNNTILIEIFKKYNSEILNNIILNLRYRDNNLIDLSGYGANVEVYDGVELNDKNQFKLTSSTNSEIRVTQNQNIIFNSMFLDFSVSFWIRIPKYKNDGIQNYIHNEYTIINCIKNNSGWKISIRGNRIIWTLTDINGKTKSVFFEYSIREDISDYINRWFFVTITNNSDNAKIYINGKLESNIDIKDIGEVIANGEIIFKLDGDIDRTQFIWMKYFSIFNTELSQSNIKEIYKIQSYSEYLKDFWGNPLMYNKEYYMFNAGNKNSYIKLKKDSPVGEILTRSKYNQNSNYINYRNLYIGEKFIIRRKSNSQSINDDIVRKEDYIYLDFFNLNQEWRVYALKNFKKKEEKLFLAPISDSDEFYNTIQIKEYDEQPTYSCQLLFKKDEESTDEIGLIGIHRFYESGIVFKDYKYYFCISKWYLKEVKRKPYNPNLGCNWQFIPKDEGWIE

SEQ ID NO: 7 - protein, 1291 aa, Clostridium botulinum
MPVTINNFNYNDPIDNNNIIMMEPPFARGTGRYYKAFKITDRIWIIPERYTFGYKPEDFNKSSGIFNRDVCEYYDPDYLNTNDKKNIFLQTMIKLFNRIKSKPLGEKLLEMIINGIPYLGDRRVPLEEFNTNIASVTVNKLISNPGEVERKKGIFANLIIFGPGPVLNENETIDIGIQNHFASREGFGGIMQMKFCPEYVSVFNNVQENKGASIFNRRGYFSDPALILMHELIHVLHGLYGIKVDDLPIVPNEKKFFMQSTDAIQAEELYTFGGQDPSIITPSTDKSIYDKVLQNFRGIVDRLNKVLVCISDPNININIYKNKFKDKYKFVEDSEGKYSIDVESFDKLYKSLMFGFTETNIAENYKIKTRASYFSDSLPPVKIKNLLDNEIYTIEEGFNISDKDMEKEYRGQNKAINKQAYEEISKEHLAVYKIQMCKSVKAPGICIDVDNEDLFFIADKNSFSDDLSKNERIEYNTKNIYIENYFSINELILDTDLISGIELPSENTESLTDFNVDVPVYEKQPAIKKIFTDENTIFQYLYSQTFPLDIRDISLTSSFDDALLFSNKVYSFFSMDYIKTANKVVEAGLFAGWVKQIIDDFVIEANKSSTMDKIADISLIVPYIGLALNVGNETAKGNFENAFEIAGASILLEFIPELLIPVVGAFLLESYIDNKNKIIKTIDNALTKRVEKWIDMYGLIVAQWLSTVNTQFYTIKEGMYKALNYQAQALEEIIKYKYNIYSEKEKLNINIDFNDINSKLNEGINQAIDNINNFINECSVSYLMKKMIPLAIEKLLDFDNALKKNLLNYIDENKLYLIGSVEEEKSKVDKFFKTIIPFDLSMYTNNTILIEMVNKYNSEILNNIILNLRYRDNNLIDSSGYGAKVEVYNGVELNDKNQFKLTSSANSKIKVTQNQNITFNSMFLDFSVSFWIRIPKYKNDGIQNYIHNEYTIINCMKNNSGWKISIRGNRIIWTLTDINGKTKSVFFEYSIREDISDYINRWFFVTITNNLDNAKIYINGKLESNIDIRDIREVIVNGEIIFKLDGEIDRTQFIWMKYFSIFNTELSQSNVKEIYKIQSYSKYLKDFWGNPLMYNKEYYMFNAGNKNSYIKLVKDSSVGEILTRSKYNQNSNYINYRNLYIGEKFIIRRKSSSQSISDDIVRKEDYIYLDFFNSNREWRVYAYKNFKGQEEKLFLANIYDSNEFYKTIQIKEYDEQPTYSCQLLFKKDEESTDEIGLIGIHNFYESGILFKDYKDYFCISKWYLKEVKKKPYSSNLGCNWQFIPKDEGWTE

SEQ ID NO: 8 - protein, 1292 aa, Clostridium botulinum
MPVTINNFNYNDPIDNNNIIMMEPPFARGTGRYYKAFKITDRIWIIPERYTFGYKPEDFNKSSGIFNRDVCEYYDPDYLNTNDKKNIFLQTMIKLFNRIKSKPLGEKLLEMIINGIPYLGDRRVPLEEFNTNIASVTVNKLISNPGGEERKEGIFANLIIFGPGPVLNENETIDIGIQNHFASREGFGGIMQMKFCPEYVSVFNNVQENKGASIFNRRGYFSDPALILMHELIHVLHGLYGIKVDDLPIVPNGKKFFMQSTDAIQAEELYTFGGQDPSIITPSTDKSIYDKVLQNFRGIVDRLNKVLVCISDPNININIYKNKFKDKYKFVEDSEGKYSIDVESFDKLYKSLMFGFTETNIAENYKIKTRASYFSDSLPPVKIKNLLDDEIYTIEEGFNISDKNMGKEYRGQNKAINKQAYEEISKEHLAVYKIQMCKSVRAPGICIDVDNEDLFFIADKNSFSDDLSKNERIEYNTQSNYIENDFSINELILDTDLISKIELPSENTESLTDFNVDVPVYEKQPAIKKIFTDENTIFQYLYSQTFPLDIRDISLTSSFDDALLFSNKVYSFFSMDYIKTANKVVEAGLFAGWVKQIVDDFVIEANKSNTMDKIADISLIVPYIGLALNVGNETAKGNFENAFEIAGSSILLEFIPELLIPVVGAFLLESYIDNKNKIIKTIDNALTKRDEKWIDMYGLIVAQWLSTVNTQFYTIKEGMYKALNYQAQALEEIIKYKYNIYSEKEKSNISIDFNDINSKLNEGINQAIDNINDFINECSVSYLMKKMIPLAVEKLLDFDNTLKKNLLNYIDENKLYLIGSAEYEKSKVDKHLKTIMTFDLSMYTNNTILIKMVNKYNSEILNNIILNLRYRDNNLIDLSGYGANVEVYDGVELNDKNQFKLTSSTNSEIRVTQNQNIIVNSMFLDFSVSFWIRIPKYKNDGIQNYIHNEYTIINCMKNNSGWKISIRGNRIIWTLIDINGKIKSVFFEYSIRKDVSEYINRWFFVTITNNLDNAKIYINGKLESNMDIRDIREVIANGEIIFKLDGDIDRTQFIWMKYFSIFNTELSQSNIEEIYKIQSYSEYLKDFWGNPLMYNKEYYMFNAGSKNSYIKLKKDSSVGEILTRSKYNQNSQYINYRDLYIGEKFIIKRKSNSQSINDDIVRKEDYIYLDFFNLNQEWRVYAYKDFKGQKEQKLFLANIHDSNEFYKTIQIKEYDEQPTYSCQLLFKKDEESTDEIGLIGIHRFYESGFVFQEYKYYFCISKWYLKEVKKKPYNPDLGCNWQFIPKDEGWTE

SEQ ID NO: 9 - protein, 432 aa, Clostridium botulinum
ILNNIILNLRYKDNNLIDLSGYGAKVEVYDGVELNDKNQFKLTSSANSKIRVTQNQNIIFNSVFLDFSVSFWIRIPKYKNDGIQNYIHNEYTIINCMKNNSGWKISIRGNRIIWTLIDINGKTKSVFFEYNIREDISEYINRWFFVTITNNLNNAKIYINGKLESNTDIKDIREVIANGEIIFKLDGDIDRTQFIWMKYFSIFNTELSQSNIEERYKIQSYSEYLKDFWGNPLMYNKEYYMFNAGNKNSYIKLKKDSPVGEILTRSKYNQNSKYINYRDLYIGEKFIIRRKSNSQSINDDIVRKEDYIYLDFFNLNQEWRVYTYKYFKKEEEKLFLAPISDSDEFYNTIQIKEYDEQPTYSCQLLFKKDEESTDEIGLIGIHRFYESGIVFEEYKDYFCISKWYLKEVKRKPYNLKLGCNWQFIPKDEGWTE

SEQ ID NO: 10 - protein, 432 aa, Clostridium botulinum
ILNNIILNLRYRDNNLIDLSGYGANVEVYDGVELNDKNQFKLTSSTNSEIRVTQNQNIIFNSMFLDFSVSFWIRIPKYKNDGIQNYIHNEYTIINCIKNNSGWKISIRGNRIIWTLTDINGKTKSVFFEYSIREDISDYINRWFFVTITNNSDNAKIYINGKLESNIDIKDIGEVIANGEIIFKLDGDIDRTQFIWMKYFSIFNTELSQSNIKEIYKIQSYSEYLKDFWGNPLMYNKEYYMFNAGNKNSYIKLKKDSSVGEILTRSKYNQNSNYINYRNLYIGEKFIIRRKSNSQSINDDIVRKEDYIYLDFFNSNREWRVYAYKDFKEEEKKLFLANIYDSNEFYKTIQIKEYDEQPTYSCQLLFKKDEESTDEIGLIGIHRFYESGIVLKDYKNYFCISKWYLKEVKRKPYNPNLGCNWQFIPKDEGWIE

SEQ ID NO: 11 - protein, 432 aa, Clostridium botulinum
ILNNIILNLRYRDNNLIDLSGYGAKVEVYNGVELNDKNQFKLTSSANSKIRVTQNQDIIFNSMFLDFSVSFWIRIPKYKNDGIQNYIHNEYTIINCIKNNSGWKISIRGNKIIWTLTDINGKTKSVFFEYSIRKDVSEYINRWFFVTITNNSDNAKIYINGKLESNIDIKDIGEVIANGEIIFKLDGDIDRTQFIWMKYFSIFNTELSQSNIKEIYKIQSYSEYLKDFWGNPLMYNKEYYMFNAGNKNSYIKLKKDSSVGEILTRSKYNQNSNYINYRNLYIGEKFIIRRKSNSQSINDDIVRKEDYIYLDFFNLNQEWRVYAYKDFKKKEEKLFLANIYDSNEFYNTIQIKEYDEQPTYSCQLLFKKDEESTDEIGLIGIHRFYESGIVFKDYKDYFCISKWYLKEVKRKPYNPNLGCNWQFIPKDEGWIE

SEQ ID NO: 12 - protein, 432 aa, Clostridium botulinum
ILNNIILNLRYRDNNLIDLSGYGAKVEVYDGVKLNDKNQFKLTSSADSKIRVTQNQNIIFNSMFLDFSVSFWIRIPKYRNDDIQNYIHNEYTIINCMKNNSGWKISIRGNRIIWTLIDINGKTKSVFFEYNIREDISEYINRWFFVTITNNLDNAKIYINGTLESNMDIKDIGEVIVNGEITFKLDGDVDRTQFIWMKYFSIFNTQLNQSNIKEIYKIQSYSEYLKDFWGNPLMYNKEYYMFNAGNKNSYIKLVKDSSVGEILIRSKYNQNSNYINYRNLYIGEKFIIRRKSNSQSINDDIVRKEDYIHLDFVNSNEEWRVYAYKNFKEQEQKLFLSIIYDSNEFYKTIQIKEYDEQPTYSCQLLFKKDEESTDDIGLIGIHRFYESGVLRKKYKDYFCISKWYLKEVKRKPYKSNLGCNWQFIPKDEGWTE

SEQ ID NO: 13 - protein, 432 aa, Clostridium botulinum
ILNNIILNLRYRDNKLIDLSGYGAKVEVYDGVKLNDKNQFKLTSSANSKIRVIQNQNIIFNSMFLDFSVSFWIRIPKYKNDGIQNYIHNEYTIINCMKNNSGWKISIRGNMIIWTLIDINGKIKSVFFEYSIKEDISEYINRWFFVTITNNSDNAKIYINGKLESHIDIRDIREVIANDEIIFKLDGNIDRTQFIWMKYFSIFNTELSQSNIEEIYKIQSYSEYLKDFWGNPLMYNKEYYMFNAGNKNSYIKLKKDSSVGEILTRSKYNQNSKYINYRDLYIGEKFIIRRKSNSQSINDDIVRKEDYIYLDFFNLNQEWRVYMYKYFKKEEEKLFLAPISDSDEFYNTIQIKEYDEQPTYSCQLLFKKDEESTDEIGLIGIHRFYESGIVFKEYKDYFCISKWYLKEVKRKPYNSKLGCNWQFIPKDEGWTE

SEQ ID NO: 14 - protein, 432 aa, Clostridium botulinum
ILNNIILNLRYRDNNLIDLSGYGANVEVYDGVELNDKNQFKLTSSTNSEIRVTQNQNIIFNSMFLDFSVSFWIRIPKYKNDGIQNYIHNEYTIINCIKNNSGWKISIRGNRIIWTLTDINGKTKSVFFEYSIREDISDYINRWFFVTITNNSDNAKIYINGKLESNIDIKDIGEVIANGEIIFKLDGDIDRTQFIWMKYFSIFNTELSQSNIKEIYKIQSYSEYLKDFWGNPLMYNKEYYMFNAGNKNSYIKLKKDSPVGEILTRSKYNQNSNYINYRNLYIGEKFIIRRKSNSQSINDDIVRKEDYIYLDFFNLNQEWRVYALKNFKKKEEKLFLAPISDSDEFYNTIQIKEYDEQPTYSCQLLFKKDEESTDEIGLIGIHRFYESGIVFKDYKYYFCISKWYLKEVKRKPYNPNLGCNWQFIPKDEGWIE

SEQ ID NO: 15 - protein, 432 aa, Clostridium botulinum
ILNNIILNLRYRDNNLIDSSGYGAKVEVYNGVELNDKNQFKLTSSANSKIKVTQNQNITFNSMFLDFSVSFWIRIPKYKNDGIQNYIHNEYTIINCMKNNSGWKISIRGNRIIWTLTDINGKTKSVFFEYSIREDISDYINRWFFVTITNNLDNAKIYINGKLESNIDIRDIREVIVNGEIIFKLDGEIDRTQFIWMKYFSIFNTELSQSNVKEIYKIQSYSKYLKDFWGNPLMYNKEYYMFNAGNKNSYIKLVKDSSVGEILTRSKYNQNSNYINYRNLYIGEKFIIRRKSSSQSISDDIVRKEDYIYLDFFNSNREWRVYAYKNFKGQEEKLFLANIYDSNEFYKTIQIKEYDEQPTYSCQLLFKKDEESTDEIGLIGIHNFYESGILFKDYKDYFCISKWYLKEVKKKPYSSNLGCNWQFIPKDEGWTE

SEQ ID NO: 16 - protein, 433 aa, Clostridium botulinum
ILNNIILNLRYRDNNLIDLSGYGANVEVYDGVELNDKNQFKLTSSTNSEIRVTQNQNIIVNSMFLDFSVSFWIRIPKYKNDGIQNYIHNEYTIINCMKNNSGWKISIRGNRIIWTLIDINGKIKSVFFEYSIRKDVSEYINRWFFVTITNNLDNAKIYINGKLESNMDIRDIREVIANGEIIFKLDGDIDRTQFIWMKYFSIFNTELSQSNIEEIYKIQSYSEYLKDFWGNPLMYNKEYYMFNAGSKNSYIKLKKDSSVGEILTRSKYNQNSQYINYRDLYIGEKFIIKRKSNSQSINDDIVRKEDYIYLDFFNLNQEWRVYAYKDFKGQKEQKLFLANIHDSNEFYKTIQIKEYDEQPTYSCQLLFKKDEESTDEIGLIGIHRFYESGFVFQEYKYYFCISKWYLKEVKKKPYNPDLGCNWQFIPKDEGWTE

SEQ ID NO: 17 - protein, 1304 aa, Artificial Sequence
  Synthetic polypeptide
MPFVNKQFNYKDPVNGVDIAYIKIPNAGQMQPVKAFKIHNKIWVIPERDTFTNPEEGDLNPPPEAKQVPVSYYDSTYLSTDNEKDNYLKGVTKLFERIYSTDLGRMLLTSIVRGIPFWGGSTIDTELKVIDTNCINVIQPDGSYRSEELNLVIIGPSADIIQFECKSFGHEVLNLTRNGYGSTQYIRFSPDFTFGFEESLEVDTNPLLGAGKFATDPAVTLAHELIHAGHRLYGIAINPNRVFKVNTNAYYEMSGLEVSFEELRTFGGHDAKFIDSLQENEFRLYYYNKFKDIASTLNKAKSIVGTTASLQYMKNVFKEKYLLSEDTSGKFSVDKLKFDKLYKMLTEIYTEDNFVKFFKVLNRKTYLNFDKAVFKINIVPKVNYTIYDGFNLRNTNLAANFNGQNTEINNMNFTKLKNFTGLFEFYKLLCVRGIITSKTKSLDKGYNKALNDLCIKVNNWDLFFSPSEDNFTNDLNKGEEITSDTNIEAAEENISLDLIQQYYLTFNFDNEPENISIENLSSDIIGQLELMPNIERFPNGKKYELDKYTMFHYLRAQEFEHGKSRIALTNSVNEALLNPSRVYTFFSSDYVKKVNKATEAAMFLGWVEQLVYDFTDETSEVSTTDKIADITIIIPYIGPALNIGNMLYKDDFVGALIFSGAVILLEFIPEIAIPVLGTFALVSYIANKVLTVQTIDNALSKRNEKWDEVYKYIVTNWLAKVNTQIDLIRKKMKEALENQAEATKAIINYQYNQYTEEEKNNINFNIDDLSSKLNESINKAMININKFLNQCSVSYLMNSMIPYGVKRLEDFDASLKDALLKYIYDNRGTLIGQVDRLKDKVNNTLSTDIPFQLSKYVDNQRLLSTFTEYIKNILNNIILNLRYKDNNLIDLSGYGAKVEVYDGVELNDKNQFKLTSSANSKIRVTQNQNIIFNSVFLDFSVSFWIRIPKYKNDGIQNYIHNEYTIINCMKNNSGWKISIRGNRIIWTLIDINGKTKSVFFEYNIREDISEYINRWFFVTITNNLNNAKIYINGKLESNTDIKDIREVIANGEIIFKLDGDIDRTQFIWMKYFSIFNTELSQSNIEERYKIQSYSEYLKDFWGNPLMYNKEYYMFNAGNKNSYIKLKKDSPVGEILTRSKYNQNSKYINYRDLYIGEKFIIRRKSNSQSINDDIVRKEDYIYLDFFNLNQEWRVYTYKYFKKEEEKLFLAPISDSDEFYNTIQIKEYDEQPTYSCQLLFKKDEESTDEIGLIGIHRFYESGIVFEEYKDYFCISKWYLKEVKRKPYNLKLGCNWQFIPKDEGWTE

SEQ ID NO: 18 - protein, 1304 aa, Artificial Sequence
  Synthetic polypeptide
MPFVNKQFNYKDPVNGVDIAYIKIPNAGQMQPVKAFKIHNKIWVIPERDTFTNPEEGDLNPPPEAKQVPVSYYDSTYLSTDNEKDNYLKGVTKLFERIYSTDLGRMLLTSIVRGIPFWGGSTIDTELKVIDTNCINVIQPDGSYRSEELNLVIIGPSADIIQFECKSFGHDVLNLTRNGYGSTQYIRFSPDFTFGFEESLEVDTNPLLGAGKFATDPAVTLAHELIHAEHRLYGIAINPNRVFKVNTNAYYEMSGLEVSFEELRTFGGHDAKFIDSLQENEFRLYYYNKFKDVASTLNKAKSIIGTTASLQYMKNVFKEKYLLSEDTSGKFSVDKLKFDKLYKMLTEIYTEDNFVNFFKVINRKTYLNFDKAVFRINIVPDENYTIKDGFNLKGANLSTNFNGQNTEINSRNFTRLKNFTGLFEFYKLLCVRGIIPFKTKSLDEGYNKALNDLCIKVNNWDLFFSPSEDNFTNDLDKVEEITADTNIEAAEENISLDLIQQYYLTFDFDNEPENISIENLSSDIIGQLEPMPNIERFPNGKKYELDKYTMFHYLRAQEFEHGDSRIILTNSAEEALLKPNVAYTFFSSKYVKKINKAVEAFMFLNWAEELVYDFTDETNEVTTMDKIADITIIVPYIGPALNIGNMLSKGEFVEAIIFTGVVAMLEFIPEYALPVFGTFAIVSYIANKVLTVQTINNALSKRNEKWDEVYKYTVTNWLAKVNTQIDLIREKMKKALENQAEATKAIINYQYNQYTEEEKNNINFNIDDLSSKLNESINSAMININKFLDQCSVSYLMNSMIPYAVKRLKDFDASVRDVLLKYIYDNRGTLVLQVDRLKDEVNNTLSADIPFQLSKYVDNKKLLSTFTEYIKNILNNIILNLRYKDNNLIDLSGYGAKVEVYDGVELNDKNQFKLTSSANSKIRVTQNQNIIFNSVFLDFSVSFWIRIPKYKNDGIQNYIHNEYTIINCMKNNSGWKISIRGNRIIWTLIDINGKTKSVFFEYNIREDISEYINRWFFVTITNNLNNAKIYINGKLESNTDIKDIREVIANGEIIFKLDGDIDRTQFIWMKYFSIFNTELSQSNIEERYKIQSYSEYLKDFWGNPLMYNKEYYMFNAGNKNSYIKLKKDSPVGEILTRSKYNQNSKYINYRDLYIGEKFIIRRKSNSQSINDDIVRKEDYIYLDFFNLNQEWRVYTYKYFKKEEEKLFLAPISDSDEFYNTIQIKEYDEQPTYSCQLLFKKDEESTDEIGLIGIHRFYESGIVFEEYKDYFCISKWYLKEVKRKPYNLKLGCNWQFIPKDEGWTE

SEQ ID NO: 19 - protein, 1304 aa, Artificial Sequence
  Synthetic polypeptide
MPFVNKPFNYRDPGNGVDIAYIKIPNAGQMQPVKAFKIHEGVWVIPERDTFTNPEEGDLNPPPEAKQVPVSYYDSTYLSTDNEKDNYLKGVIKLFDRIYSTGLGRMLLSFIVKGIPFWGGSTIDTELKVIDTNCINVIEPGGSYRSEELNLVITGPSADIIQFECKSFGHDVFNLTRNGYGSTQYIRFSPDFTFGFEESLEVDTNPLLGAGTFATDPAVTLAHELIHAAHRLYGIAINPNRVLKVKTNAYYEMSGLEVSFEELRTFGGNDTNFIDSLWQKKFSRDAYDNLQNIARILNEAKTIVGTTTPLQYMKNIFIRKYFLSEDASGKISVNKAAFKEFYRVLTRGFTELEFVNPFKVINRKTYLNFDKAVFRINIVPDENYTINEGFNLEGANSNGQNTEINSRNFTRLKNFTGLFEFYKLLCVRGIIPFKTKSLDEGYNKALNYLCIKVNNWDLFFSPSEDNFTNDLDKVEEITADTNIEAAEENISSDLIQQYYLTFDFDNEPENISIENLSSDIIGQLEPMPNIERFPNGKKYELDKYTMFHYLRAQEFEHGDSRIILTNSAEEALLKPNVAYTFFSSKYVKKINKAVEAVIFLSWAEELVYDFTDETNEVTTMDKIADITIIVPYIGPALNIGNMVSKGEFVEAILFTGVVALLEFIPEYSLPVFGTFAIVSYIANKVLTVQTINNALSKRNEKWDEVYKYTVTNWLAKVNTQIDLIREKMKKALENQAEATRAIINYQYNQYTEEEKNNINFNIDDLSSKLNRSINRAMININKFLDQCSVSYLMNSMIPYAVKRLKDFDASVRDVLLKYIYDNRGTLILQVDRLKDEVNNTLSADIPFQLSKYVNDKKLLSTFTEYIKNIVNTILNNIILNLRYKDNNLIDLSGYGAKVEVYDGVELNDKNQFKLTSSANSKIRVTQNQNIIFNSVFLDFSVSFWIRIPKYKNDGIQNYIHNEYTIINCMKNNSGWKISIRGNRIIWTLIDINGKTKSVFFEYNIREDISEYINRWFFVTITNNLNNAKIYINGKLESNTDIKDIREVIANGEIIFKLDGDIDRTQFIWMKYFSIFNTELSQSNIEERYKIQSYSEYLKDFWGNPLMYNKEYYMFNAGNKNSYIKLKKDSPVGEILTRSKYNQNSKYINYRDLYIGEKFIIRRKSNSQSINDDIVRKEDYIYLDFFNLNQEWRVYTYKYFKKEEEKLFLAPISDSDEFYNTIQIKEYDEQPTYSCQLLFKKDEESTDEIGLIGIHRFYESGIVFEEYKDYFCISKWYLKEVKRKPYNLKLGCNWQFIPKDEGWTE

SEQ ID NO: 20 - protein, 1304 aa, Artificial Sequence
  Synthetic polypeptide
MPLVNQQINYYDPVNGVDIAYIKIPNAGKMQPVKAFKIHNKVWVIPERDIFTNPEEVDLNPPPEAKQVPISYYDSAYLSTDNEKDNYLKGVIKLFERIYSTDLGRMLLISIVRGIPFWGGGKIDTELKVIDTNCINIIQLDDSYRSEELNLAIIGPSANIIESQCSSFRDDVLNLTRNGYGSTQYIRFSPDFTVGFEESLEVDTNPLLGAGKFAQDPAVALAHELIHAEHRLYGIAINTNRVFKVNTNAYYEMAGLEVSLEELITFGGNDAKFIDSLQKKEFSLYYYNKFKDIASTLNKAKSIVGTTASLQYMKNVFKEKYLLSEDATGKFLVDRLKFDELYKLLTEIYTEDNFVKFFKVLNRKTYLNFDKAVFKINIVPDVNYTIHDGFNLRNTNLAANFNGQNIEINNKNFDKLKNFTGLFEFYKLLCVRGIITSKTKSLDEGYNKALNELCIKVNNWDLFFSPSEDNFTNDLDKVEEITSDTNIEAAEENISLDLIQQYYLNFNFDNEPENTSIENLSSDIIGQLEPMPNIERFPNGKKYELNKYTMFHYLRAQEFKHSNSRIILTNSAKEALLKPNIVYTFFSSKYIKAINKAVEAVTFVNWIENLVYDFTDETNEVSTMDKIADITIVIPYIGPALNIGNMIYKGEFVEAIIFSGAVILLEIVPEIALPVLGTFALVSYVSNKVLTVQTIDNALSKRNEKWDEVYKYIVTNWLAIVNTQINLIREKMKKALENQAEATKAIINYQYNQYTEEEKNNINFNIDDLSSKLNESINSAMININKFLDQCSVSYLMNSMIPYAVKRLKDFDASVRDVLLKYIYDNRGTLIGQVNRLKDKVNNTLSADIPFQLSKYVDNKKLLSTFTEYIKNILNNIILNLRYKDNNLIDLSGYGAKVEVYDGVELNDKNQFKLTSSANSKIRVTQNQNIIFNSVFLDFSVSFWIRIPKYKNDGIQNYIHNEYTIINCMKNNSGWKISIRGNRIIWTLIDINGKTKSVFFEYNIREDISEYINRWFFVTITNNLNNAKIYINGKLESNTDIKDIREVIANGEIIFKLDGDIDRTQFIWMKYFSIFNTELSQSNIEERYKIQSYSEYLKDFWGNPLMYNKEYYMFNAGNKNSYIKLKKDSPVGEILTRSKYNQNSKYINYRDLYIGEKFIIRRKSNSQSINDDIVRKEDYIYLDFFNLNQEWRVYTYKYFKKEEEKLFLAPISDSDEFYNTIQIKEYDEQPTYSCQLLFKKDEESTDEIGLIGIHRFYESGIVFEEYKDYFCISKWYLKEVKRKPYNLKLGCNWQFIPKDEGWTE

SEQ ID NO: 21 - protein, 1304 aa, Artificial Sequence
  Synthetic polypeptide
MLFVNKQFNYKDPVNGVDIAYIKIPNAGQMQPVKAFKIHNKIWVIPERDTFTNPEEGDLNPPPEAKQVPVSYYDSTYLSTDNEKDNYLKGVTKLFERIYSTELGRMLLTSIVRGIPFWGGSTIDTELKVIDTNCINVIQPDGSYRSEELNLVIIGPSADIIQFECKSFGHDVLNLTRNGYGSTQYIRFSPDFTFGFEESLEVDTNPLLGAGKFATDPAVTLAHELIHAGHRLYGIAINPNRVFKVNTNAYYEMSGLEVSFEELRTFGEHDAKFIDSLQENEFRLYYYNKFKDIASTLNKAKSIVGTTASLQYMKNVFKEKYLLSEDTSGKFSVDKLKFDKLYKMLTEIYTEDNFVKFFKVLNRKTYLNFDKAVFKINIVPEVNYTIYDGFNLRNTNLAANFNGQNTEINNMNFTKLKNFTGLFEFYKLLCVRGIITSKTKSLDEGYNKALNDLCIKVNNWDLFFSPSEDNFTNDLNKGEEITSDTNIEAAEENISLDLIQQYYLTFNFDNEPENISIENLSSDIIGQLELMPNIERFPNGKKYELDKYTMFHYLRAQEFEHGKSRIVLTNSVNEALLNPSSVYTFFSSDYVRKVNKATEAAMFLGWVEQLVYDFTDETSEVSTTDKIADITIIIPYIGPALNIGNMLYKDDFVGALIFSGAVILLEFIPEIAIPVLGTFALVSYIANKVLTVQTIDNALSKRNEKWGEVYKYIVTNWLAKVNTQIDLIRKKMKEALENQAEATKAIINYQYNQYTEEEKNNINFNIGDLSSKLNDSINKAMININKFLNQCSVSYLMNSMIPYGVKRLEDFDASLKDALLKYIYDNRGTLIGQVDRLKDKVNNTLSTDIPFQLSKYVDNQRLLSTFTEYIKNILNNIILNLRYKDNNLIDLSGYGAKVEVYDGVELNDKNQFKLTSSANSKIRVTQNQNIIFNSVFLDFSVSFWIRIPKYKNDGIQNYIHNEYTIINCMKNNSGWKISIRGNRIIWTLIDINGKTKSVFFEYNIREDISEYINRWFFVTITNNLNNAKIYINGKLESNTDIKDIREVIANGEIIFKLDGDIDRTQFIWMKYFSIFNTELSQSNIEERYKIQSYSEYLKDFWGNPLMYNKEYYMFNAGNKNSYIKLKKDSPVGEILTRSKYNQNSKYINYRDLYIGEKFIIRRKSNSQSINDDIVRKEDYIYLDFFNLNQEWRVYTYKYFKKEEEKLFLAPISDSDEFYNTIQIKEYDEQPTYSCQLLFKKDEESTDEIGLIGIHRFYESGIVFEEYKDYFCISKWYLKEVKRKPYNLKLGCNWQFIPKDEGWTE

SEQ ID NO: 22 - protein, 1304 aa, Artificial Sequence
  Synthetic polypeptide
MPFVNKQFNYKDPVNGVDIAYIKIPNAGQMQPVKAFKIHNKIWVIPERDTFTNPEEGDLNPPPEAKQVPVSYYDSTYLSTDNEKDNYLKGVTKLFERIYSTDLGRMLLTSIVRGIPFWGGSTIDTELKVIDTNCINVIQPDGSYRSEELNLVIIGPSADIIQFECKSFGHEVLNLTRNGYGSTQYIRFSPDFTFGFEESLEVDTNPLLGAGKFATDPAVTLAHELIHAGHRLYGIAINPNRVFKVNTNAYYEMSGLEVSFEELRTFGGHDAKFIDSLQENEFRLYYYNKFKDIASTLNKAKSIVGTTASLQYMKNVFKEKYLLSEDTSGKFSVDKLKFDKLYKMLTEIYTEDNFVKFFKVLNRKTYLNFDKAVFKINIVPKVNYTIYDGFNLRNTNLAANFNGQNTEINNMNFAKLKNFTGLFEFYKLLCVRGIITSKTKSLDKGYNKALNDLCIKVNNWDLFFSPSEDNFTNDLNKGEEITSDTNIEAAEENISLDLIQQYYLTFNFDNEPENISIENLSSDIIGQLELMPNIERFPNGKKYELDKYTMFHYLSAQEFEHGKSRIDLTNSVNEALLNPSHVYTFFSSDYVKKVNKATEAAMFLGWVEQLVYDFTDETSEVSTTDKIADITIIIPYIGPALNIGNMLYKDDFVGALIFSGAVILLEFIPEIAIPVLGTFAIVSYIANKVLTVQTINNALSKRNEKWDEVYKYTVTNWLAKVNTQIDLIREKMKKALENQAEATKAIINYQYNQYTEEEKNNINFNIDDLSSKLNESINSAMININKFLDQCSVSYLMNSMIPYAVKRLKDFDASVRDVLLKYIYDNRGTLIGQVDRLKDKVNNTLSTDIPFQLSKYVDNQRLLSTFTEYIKNILNNIILNLRYKDNNLIDLSGYGAKVEVYDGVELNDKNQFKLTSSANSKIRVTQNQNIIFNSVFLDFSVSFWIRIPKYKNDGIQNYIHNEYTIINCMKNNSGWKISIRGNRIIWTLIDINGKTKSVFFEYNIREDISEYINRWFFVTITNNLNNAKIYINGKLESNTDIKDIREVIANGEIIFKLDGDIDRTQFIWMKYFSIFNTELSQSNIEERYKIQSYSEYLKDFWGNPLMYNKEYYMFNAGNKNSYIKLKKDSPVGEILTRSKYNQNSKYINYRDLYIGEKFIIRRKSNSQSINDDIVRKEDYIYLDFFNLNQEWRVYTYKYFKKEEEKLFLAPISDSDEFYNTIQIKEYDEQPTYSCQLLFKKDEESTDEIGLIGIHRFYESGIVFEEYKDYFCISKWYLKEVKRKPYNLKLGCNWQFIPKDEGWTE

SEQ ID NO: 23 - protein, 1304 aa, Artificial Sequence
  Synthetic polypeptide
MPFVNKQFNYKDPVNGVDIAYIKIPNAGQMQPVKAFKIHNKIWVIPERDIFTNPEEGDLNPPPEAKQVPVSYYDSTYLSTDNEKDNYLKGVTKLFERIYSTDLGRMLLTSIVRGIPFWGGSTIDTELKVIDTNCINVIQPDGSYRSEELNLVIIGPSADIINFECKSFGHDVLNLTRNGYGSTQYIRFSPDFTFGFEESLEVDTNPLLGAGKFAIDPAVTLAHELIHAGHRLYGIAINPNRVFKVNTNAYYEMSGLEVSFEELRTFGGHDAKFIDSLQENEFRLYYYNKFKEVASILNKAKSIIGTTASLQYMKNVFKEKYLLSEDTSGKFSVDKLRFDKLYKMLTEIYTEDNFVKFFKVLNRKTYLNFDKAVFKMNIVPEVNYTIYDGFNLRNTNLAANFNGQNTEINNMNFTKLKNFTGLFEFYKLLCVRGIITSKTKSLDEGYNKALNDLCIKVNNWDLFFSPSEDNFTNDLNKGEEITSDTNIEAAEENISSDLIQQYYLTFNFDNEPENISIENLSSDIIGQLELMPNIERFPNGKKYELDKYTMFHYLRAQEFEYGNSRIVLINSVNEALLNPSSVYTFFSSDYVKKANEATEAAMFLGWVEQLVYDFTDETSEVSTMDKIADITIIVPYIGPALNIGNMVYKKKFEEALIFSGAVILLEFVPEIVLPILGTFALVSYTSNKVLTVRTIDNALSKRNEKWEEVYKYIVTNWLAKVNTQINLIRKKMKEALENQAEATKAIINYQYNQYTEEEKNNINFNIGDLSSKLNDSINKAMININKFLDQCSVSYLMNSMIPQGVKQLKDFDTSLRDSLLKYIYDNRGTLIGQVDRLKDKVNNTLSTDIPFQLSKYADNQRLLSTFTEYIKNILNNIILNLRYKDNNLIDLSGYGAKVEVYDGVELNDKNQFKLTSSANSKIRVTQNQNIIFNSVFLDFSVSFWIRIPKYKNDGIQNYIHNEYTIINCMKNNSGWKISIRGNRIIWTLIDINGKTKSVFFEYNIREDISEYINRWFFVTITNNLNNAKIYINGKLESNTDIKDIREVIANGEIIFKLDGDIDRTQFIWMKYFSIFNTELSQSNIEERYKIQSYSEYLKDFWGNPLMYNKEYYMFNAGNKNSYIKLKKDSPVGEILTRSKYNQNSKYINYRDLYIGEKFIIRRKSNSQSINDDIVRKEDYIYLDFFNLNQEWRVYTYKYFKKEEEKLFLAPISDSDEFYNTIQIKEYDEQPTYSCQLLFKKDEESTDEIGLIGIHRFYESGIVFEEYKDYFCISKWYLKEVKRKPYNLKLGCNWQFIPKDEGWTE

SEQ ID NO: 24 - protein, 1304 aa, Artificial Sequence
  Synthetic polypeptide
MPFVNKQFNYKDTVNGIDIAYIKIPNAGQMQPVKAFKIHNKIWVIPERDTFTNPKEGDLNPPPEAKQVPVSYYDSTYLSTDNEKDNYLKGVTKLFERIYSTDLGRMLLTSIVRGIPFWGGSTIDTELKVIDTNCINVIQPDGSYRSEELNLVIIGPSADIIQFECKSFGHDVLNLTRNGYGSTQYIRFSPDFTFGFEESLEVDTNPLLGAGKFATDPAVTLAHELIHAEHRLYGIAINPNRVFKVNTNAYYEMSGLEVSFEELRTFGGHNAKFIDSLQENEFRLYYYNKFKDIASTLNKAKSIVGTTASLQYMKNVFKEKYLLSEDTSGKFSVDKLKFDKLYKMLTEIYTEDNFVKFFKVLNRKTYLNFDKAVFKINIVPDENYTIKDGFNLKNTNLAANFNGQNTEINSRNFTKLKNFTGLFEFYKLLCVRGIIPFKTKSLDEGYNKALNDLCIKVNNWDLFFSPSEDNFTNDLDKVEEITSDTNIEAAEENISLDLIQQYYLTFDFDNEPENISIENLSSDIIGQLEPMPNIERFPNGKKYELDKYTMFHYLRAQEFEHSKSRIALTNSVNEALLNPSRVYTFFSSDYVKKVNKATEAAMFLGWVEQLVYDFTDETSEVSTTDKIADITIIIPYIGPALNIGNMLYKDDFVGALIFSGAVILLEFIPEIAIPVLGTFALVSYIANKVLTVQTIDNALSKRNEKWDEVYKYIVTNWLAKVNTQIDLVRKKMKEALENQAEATKAIINYQYNQYTEEEKNNINFNIDDLSSKLNESINSAMTNINKFLDQCSVSYLMNSMIPYAVKRLKDFDASVREVLLKYIYDNRGTLILQVDRLKDKVNNTLSADIPFQLSKYVDNKKLLSTFTEYIKNILNNIILNLRYKDNNLIDLSGYGAKVEVYDGVELNDKNQFKLTSSANSKIRVTQNQNIIFNSVFLDFSVSFWIRIPKYKNDGIQNYIHNEYTIINCMKNNSGWKISIRGNRIIWTLIDINGKTKSVFFEYNIREDISEYINRWFFVTITNNLNNAKIYINGKLESNTDIKDIREVIANGEIIFKLDGDIDRTQFIWMKYFSIFNTELSQSNIEERYKIQSYSEYLKDFWGNPLMYNKEYYMFNAGNKNSYIKLKKDSPVGEILTRSKYNQNSKYINYRDLYIGEKFIIRRKSNSQSINDDIVRKEDYIYLDFFNLNQEWRVYTYKYFKKEEEKLFLAPISDSDEFYNTIQIKEYDEQPTYSCQLLFKKDEESTDEIGLIGIHRFYESGIVFEEYKDYFCISKWYLKEVKRKPYNLKLGCNWQFIPKDEGWTE

SEQ ID NO: 25 - protein, 1291 aa, Artificial Sequence
  Synthetic polypeptide
MPVTINNFNYNDPIDNNNIIMMEPPFARGTGRYYKAFKITDRIWIIPERYTFGYKPEDFNKSSGIFNRDVCEYYDPDYLNTNDKKNIFLQTMIKLFNRIKSKPLGEKLLEMIINGIPYLGDRRVPLEEFNTNIASVTVNKLISNPGEVERKKGIFANLIIFGPGPVLNENETIDIGIQNHFASREGFGGIMQMKFCPEYVSVFNNVQENKGASIFNRRGYFSDPALILMHELIHVLHGLYGIKVDDLPIVPNEKKFFMQSTDAIQAEELYTFGGQDPSIITPSTDKSIYDKVLQNFRGIVDRLNKVLVCISDPNININIYKNKFKDKYKFVEDSEGKYSIDVESFDKLYKSLMFGFTETNIAENYKIKTRASYFSDSLPPVKIKNLLDNEIYTIEEGFNISDKDMEKEYRGQNKAINKQAYEEISKEHLAVYKIQMCKSVKAPGICIDVDNEDLFFIADKNSFSDDLSKNERIEYNTQSNYIENDFPINELILDTDLISKIELPSENTESLTDFNVDVPVYEKQPAIKKIFTDENTIFQYLYSQTFPLDIRDISLTSSFDDALLFSNKVYSFFSMDYIKTANKVVEAGLFAGWVKQIVNDFVIEANKSNTMDKIADISLIVPYIGLALNVGNETAKGNFENAFEIAGASILLEFIPELLIPVVGAFLLESYIDNKNKIIKTIDNALTKRNEKWSDMYGLIVAQWLSTVNTQFYTIKEGMYKALNYQAQALEEIIKYRYNIYSEKEKSNINIDFNDINSKLNEGINQAIDNINNFINGCSVSYLMKKMIPLAVEKLLDFDNTLKKNLLNYIDENKLYLIGSAEYEKSKVNKYLKTIMPFDLSIYTNDTILIEMFNKYNSEILNNIILNLRYKDNNLIDLSGYGAKVEVYDGVELNDKNQFKLTSSANSKIRVTQNQNIIFNSVFLDFSVSFWIRIPKYKNDGIQNYIHNEYTIINCMKNNSGWKISIRGNRIIWTLIDINGKTKSVFFEYNIREDISEYINRWFFVTITNNLNNAKIYINGKLESNTDIKDIREVIANGEIIFKLDGDIDRTQFIWMKYFSIFNTELSQSNIEERYKIQSYSEYLKDFWGNPLMYNKEYYMFNAGNKNSYIKLKKDSPVGEILTRSKYNQNSKYINYRDLYIGEKFIIRRKSNSQSINDDIVRKEDYIYLDFFNLNQEWRVYTYKYFKKEEEKLFLAPISDSDEFYNTIQIKEYDEQPTYSCQLLFKKDEESTDEIGLIGIHRFYESGWWFEEYKDYFCISKWYLKEVKRKPYNLKLGCNWQFIPKDEGWTE

SEQ ID NO: 26 - protein, 432 aa, Artificial Sequence
  Synthetic polypeptide
ILNNIILNLRYKDNNLIDLSGYGAKVEVYDGVELNDKNQFKLTSSANSKIRVTQNQNIIFNSVFLDFSVSFWIRIPKYKNDGIQNYIHNEYTIINCMKNNSGWKISIRGNRIIWTLIDINGKTKSVFFEYNIREDISEYINRWFFVTITNNLNNAKIYINGKLESNTDIKDIREVIANGEIIFKLDGDIDRTQFIWMKYFSIFNTELSQSNIEERYKIQSYSEYLKDFWGNPLMYNKEYYMFNAGNKNSYIKLKKDSPVGEILTRSKYNQNSKYINYRDLYIGEKFIIRRKSNSQSINDDIVRKEDYIYLDFFNLNQEWRVYTYKYFKKEEEKLFLAPISDSDEFYNTIQIKEYDEQPTYSCQLLFKKDEESTDEIGLIGIHRFYESGWWFEEYKDYFCISKWYLKEVKRKPYNLKLGCNWQFIPKDEGWTE

SEQ ID NO: 27 - protein, 1304 aa, Artificial Sequence
  Synthetic polypeptide
MPFVNKQFNYKDPVNGVDIAYIKIPNAGQMQPVKAFKIHNKIWVIPERDTFTNPEEGDLNPPPEAKQVPVSYYDSTYLSTDNEKDNYLKGVTKLFERIYSTDLGRMLLTSIVRGIPFWGGSTIDTELKVIDTNCINVIQPDGSYRSEELNLVIIGPSADIIQFECKSFGHEVLNLTRNGYGSTQYIRFSPDFTFGFEESLEVDTNPLLGAGKFATDPAVTLAHELIHAGHRLYGIAINPNRVFKVNTNAYYEMSGLEVSFEELRTFGGHDAKFIDSLQENEFRLYYYNKFKDIASTLNKAKSIVGTTASLQYMKNVFKEKYLLSEDTSGKFSVDKLKFDKLYKMLTEIYTEDNFVKFFKVLNRKTYLNFDKAVFKINIVPKVNYTIYDGFNLRNTNLAANFNGQNTEINNMNFTKLKNFTGLFEFYKLLCVRGIITSKTKSLDKGYNKALNDLCIKVNNWDLFFSPSEDNFTNDLNKGEEITSDTNIEAAEENISLDLIQQYYLTFNFDNEPENISIENLSSDIIGQLELMPNIERFPNGKKYELDKYTMFHYLRAQEFEHGKSRIALTNSVNEALLNPSRVYTFFSSDYVKKVNKATEAAMFLGWVEQLVYDFTDETSEVSTTDKIADITIIIPYIGPALNIGNMLYKDDFVGALIFSGAVILLEFIPEIAIPVLGTFALVSYIANKVLTVQTIDNALSKRNEKWDEVYKYIVTNWLAKVNTQIDLIRKKMKEALENQAEATKAIINYQYNQYTEEEKNNINFNIDDLSSKLNESINKAMININKFLNQCSVSYLMNSMIPYGVKRLEDFDASLKDALLKYIYDNRGTLIGQVDRLKDKVNNTLSTDIPFQLSKYVDNQRLLSTFTEYIKNILNNIILNLRYKDNNLIDLSGYGAKVEVYDGVELNDKNQFKLTSSANSKIRVTQNQNIIFNSVFLDFSVSFWIRIPKYKNDGIQNYIHNEYTIINCMKNNSGWKISIRGNRIIWTLIDINGKTKSVFFEYNIREDISEYINRWFFVTITNNLNNAKIYINGKLESNTDIKDIREVIANGEIIFKLDGDIDRTQFIWMKYFSIFNTELSQSNIEERYKIQSYSEYLKDFWGNPLMYNKEYYMFNAGNKNSYIKLKKDSPVGEILTRSKYNQNSKYINYRDLYIGEKFIIRRKSNSQSINDDIVRKEDYIYLDFFNLNQEWRVYTYKYFKKEEEKLFLAPISDSDEFYNTIQIKEYDEQPTYSCQLLFKKDEESTDEIGLIGIHRFYESGWWFEEYKDYFCISKWYLKEVKRKPYNLKLGCNWQFIPKDEGWTE

SEQ ID NO: 28 - protein, 1304 aa, Artificial Sequence
  Synthetic polypeptide
MPFVNKQFNYKDPVNGVDIAYIKIPNAGQMQPVKAFKIHNKIWVIPERDTFTNPEEGDLNPPPEAKQVPVSYYDSTYLSTDNEKDNYLKGVTKLFERIYSTDLGRMLLTSIVRGIPFWGGSTIDTELKVIDTNCINVIQPDGSYRSEELNLVIIGPSADIIQFECKSFGHDVLNLTRNGYGSTQYIRFSPDFTFGFEESLEVDTNPLLGAGKFATDPAVTLAHELIHAEHRLYGIAINPNRVFKVNTNAYYEMSGLEVSFEELRTFGGHDAKFIDSLQENEFRLYYYNKFKDVASTLNKAKSIIGTTASLQYMKNVFKEKYLLSEDTSGKFSVDKLKFDKLYKMLTEIYTEDNFVNFFKVINRKTYLNFDKAVFRINIVPDENYTIKDGFNLKGANLSTNFNGQNTEINSRNFTRLKNFTGLFEFYKLLCVRGIIPFKTKSLDEGYNKALNDLCIKVNNWDLFFSPSEDNFTNDLDKVEEITADTNIEAAEENISLDLIQQYYLTFDFDNEPENISIENLSSDIIGQLEPMPNIERFPNGKKYELDKYTMFHYLRAQEFEHGDSRIILTNSAEEALLKPNVAYTFFSSKYVKKINKAVEAFMFLNWAEELVYDFTDETNEVTTMDKIADITIIVPYIGPALNIGNMLSKGEFVEAIIFTGVVAMLEFIPEYALPVFGTFAIVSYIANKVLTVQTINNALSKRNEKWDEVYKYTVTNWLAKVNTQIDLIREKMKKALENQAEATKAIINYQYNQYTEEEKNNINFNIDDLSSKLNESINSAMININKFLDQCSVSYLMNSMIPYAVKRLKDFDASVRDVLLKYIYDNRGTLVLQVDRLKDEVNNTLSADIPFQLSKYVDNKKLLSTFTEYIKNILNNIILNLRYKDNNLIDLSGYGAKVEVYDGVELNDKNQFKLTSSANSKIRVTQNQNIIFNSVFLDFSVSFWIRIPKYKNDGIQNYIHNEYTIINCMKNNSGWKISIRGNRIIWTLIDINGKTKSVFFEYNIREDISEYINRWFFVTITNNLNNAKIYINGKLESNTDIKDIREVIANGEIIFKLDGDIDRTQFIWMKYFSIFNTELSQSNIEERYKIQSYSEYLKDFWGNPLMYNKEYYMFNAGNKNSYIKLKKDSPVGEILTRSKYNQNSKYINYRDLYIGEKFIIRRKSNSQSINDDIVRKEDYIYLDFFNLNQEWRVYTYKYFKKEEEKLFLAPISDSDEFYNTIQIKEYDEQPTYSCQLLFKKDEESTDEIGLIGIHRFYESGWWFEEYKDYFCISKWYLKEVKRKPYNLKLGCNWQFIPKDEGWTE

SEQ ID NO: 29 - protein, 872 aa, Artificial Sequence
  Synthetic polypeptide
MPFVNKQFNYKDPVNGVDIAYIKIPNAGQMQPVKAFKIHNKIWVIPERDTFTNPEEGDLNPPPEAKQVPVSYYDSTYLSTDNEKDNYLKGVTKLFERIYSTDLGRMLLTSIVRGIPFWGGSTIDTELKVIDTNCINVIQPDGSYRSEELNLVIIGPSADIIQFECKSFGHEVLNLTRNGYGSTQYIRFSPDFTFGFEESLEVDTNPLLGAGKFATDPAVTLAHELIHAGHRLYGIAINPNRVFKVNTNAYYEMSGLEVSFEELRTFGGHDAKFIDSLQENEFRLYYYNKFKDIASTLNKAKSIVGTTASLQYMKNVFKEKYLLSEDTSGKFSVDKLKFDKLYKMLTEIYTEDNFVKFFKVLNRKTYLNFDKAVFKINIVPKVNYTIYDGFNLRNTNLAANFNGQNTEINNMNFTKLKNFTGLFEFYKLLCVRGIITSKTKSLDKGYNKALNDLCIKVNNWDLFFSPSEDNFTNDLNKGEEITSDTNIEAAEENISLDLIQQYYLTFNFDNEPENISIENLSSDIIGQLELMPNIERFPNGKKYELDKYTMFHYLRAQEFEHGKSRIALTNSVNEALLNPSRVYTFFSSDYVKKVNKATEAAMFLGWVEQLVYDFTDETSEVSTTDKIADITIIIPYIGPALNIGNMLYKDDFVGALIFSGAVILLEFIPEIAIPVLGTFALVSYIANKVLTVQTIDNALSKRNEKWDEVYKYIVTNWLAKVNTQIDLIRKKMKEALENQAEATKAIINYQYNQYTEEEKNNINFNIDDLSSKLNESINKAMININKFLNQCSVSYLMNSMIPYGVKRLEDFDASLKDALLKYIYDNRGTLIGQVDRLKDKVNNTLSTDIPFQLSKYVDNQRLLSTFTEYIKN

SEQ ID NO: 30 - protein, 872 aa, Artificial Sequence
  Synthetic polypeptide
MPFVNKQFNYKDPVNGVDIAYIKIPNAGQMQPVKAFKIHNKIWVIPERDTFTNPEEGDLNPPPEAKQVPVSYYDSTYLSTDNEKDNYLKGVTKLFERIYSTDLGRMLLTSIVRGIPFWGGSTIDTELKVIDTNCINVIQPDGSYRSEELNLVIIGPSADIIQFECKSFGHDVLNLTRNGYGSTQYIRFSPDFTFGFEESLEVDTNPLLGAGKFATDPAVTLAHELIHAEHRLYGIAINPNRVFKVNTNAYYEMSGLEVSFEELRTFGGHDAKFIDSLQENEFRLYYYNKFKDVASTLNKAKSIIGTTASLQYMKNVFKEKYLLSEDTSGKFSVDKLKFDKLYKMLTEIYTEDNFVNFFKVINRKTYLNFDKAVFRINIVPDENYTIKDGFNLKGANLSTNFNGQNTEINSRNFTRLKNFTGLFEFYKLLCVRGIIPFKTKSLDEGYNKALNDLCIKVNNWDLFFSPSEDNFTNDLDKVEEITADTNIEAAEENISLDLIQQYYLTFDFDNEPENISIENLSSDIIGQLEPMPNIERFPNGKKYELDKYTMFHYLRAQEFEHGDSRIILTNSAEEALLKPNVAYTFFSSKYVKKINKAVEAFMFLNWAEELVYDFTDETNEVTTMDKIADITIIVPYIGPALNIGNMLSKGEFVEAIIFTGVVAMLEFIPEYALPVFGTFAIVSYIANKVLTVQTINNALSKRNEKWDEVYKYTVTNWLAKVNTQIDLIREKMKKALENQAEATKAIINYQYNQYTEEEKNNINFNIDDLSSKLNESINSAMININKFLDQCSVSYLMNSMIPYAVKRLKDFDASVRDVLLKYIYDNRGTLVLQVDRLKDEVNNTLSADIPFQLSKYVDNKKLLSTFTEYIKN

SEQ ID NO: 31 - protein, 872 aa, Artificial Sequence
  Synthetic polypeptide
MPFVNKPFNYRDPGNGVDIAYIKIPNAGQMQPVKAFKIHEGVWVIPERDTFTNPEEGDLNPPPEAKQVPVSYYDSTYLSTDNEKDNYLKGVIKLFDRIYSTGLGRMLLSFIVKGIPFWGGSTIDTELKVIDTNCINVIEPGGSYRSEELNLVITGPSADIIQFECKSFGHDVFNLTRNGYGSTQYIRFSPDFTFGFEESLEVDTNPLLGAGTFATDPAVTLAHELIHAAHRLYGIAINPNRVLKVKTNAYYEMSGLEVSFEELRTFGGNDTNFIDSLWQKKFSRDAYDNLQNIARILNEAKTIVGTTTPLQYMKNIFIRKYFLSEDASGKISVNKAAFKEFYRVLTRGFTELEFVNPFKVINRKTYLNFDKAVFRINIVPDENYTINEGFNLEGANSNGQNTEINSRNFTRLKNFTGLFEFYKLLCVRGIIPFKTKSLDEGYNKALNYLCIKVNNWDLFFSPSEDNFTNDLDKVEEITADTNIEAAEENISSDLIQQYYLTFDFDNEPENISIENLSSDIIGQLEPMPNIERFPNGKKYELDKYTMFHYLRAQEFEHGDSRIILTNSAEEALLKPNVAYTFFSSKYVKKINKAVEAVIFLSWAEELVYDFTDETNEVTTMDKIADITIIVPYIGPALNIGNMVSKGEFVEAILFTGVVALLEFIPEYSLPVFGTFAIVSYIANKVLTVQTINNALSKRNEKWDEVYKYTVTNWLAKVNTQIDLIREKMKKALENQAEATRAIINYQYNQYTEEEKNNINFNIDDLSSKLNRSINRAMININKFLDQCSVSYLMNSMIPYAVKRLKDFDASVRDVLLKYIYDNRGTLILQVDRLKDEVNNTLSADIPFQLSKYVNDKKLLSTFTEYIKNIVNT

SEQ ID NO: 32 - protein, 872 aa, Artificial Sequence
  Synthetic polypeptide
MPLVNQQINYYDPVNGVDIAYIKIPNAGKMQPVKAFKIHNKVWVIPERDIFTNPEEVDLNPPPEAKQVPISYYDSAYLSTDNEKDNYLKGVIKLFERIYSTDLGRMLLISIVRGIPFWGGGKIDTELKVIDTNCINIIQLDDSYRSEELNLAIIGPSANIIESQCSSFRDDVLNLTRNGYGSTQYIRFSPDFTVGFEESLEVDTNPLLGAGKFAQDPAVALAHELIHAEHRLYGIAINTNRVFKVNTNAYYEMAGLEVSLEELITFGGNDAKFIDSLQKKEFSLYYYNKFKDIASTLNKAKSIVGTTASLQYMKNVFKEKYLLSEDATGKFLVDRLKFDELYKLLTEIYTEDNFVKFFKVLNRKTYLNFDKAVFKINIVPDVNYTIHDGFNLRNTNLAANFNGQNIEINNKNFDKLKNFTGLFEFYKLLCVRGIITSKTKSLDEGYNKALNELCIKVNNWDLFFSPSEDNFTNDLDKVEEITSDTNIEAAEENISLDLIQQYYLNFNFDNEPENTSIENLSSDIIGQLEPMPNIERFPNGKKYELNKYTMFHYLRAQEFKHSNSRIILTNSAKEALLKPNIVYTFFSSKYIKAINKAVEAVTFVNWIENLVYDFTDETNEVSTMDKIADITIVIPYIGPALNIGNMIYKGEFVEAIIFSGAVILLEIVPEIALPVLGTFALVSYVSNKVLTVQTIDNALSKRNEKWDEVYKYIVTNWLAIVNTQINLIREKMKKALENQAEATKAIINYQYNQYTEEEKNNINFNIDDLSSKLNESINSAMININKFLDQCSVSYLMNSMIPYAVKRLKDFDASVRDVLLKYIYDNRGTLIGQVNRLKDKVNNTLSADIPFQLSKYVDNKKLLSTFTEYIKN

SEQ ID NO: 33 - protein, 872 aa, Artificial Sequence
  Synthetic polypeptide
MLFVNKQFNYKDPVNGVDIAYIKIPNAGQMQPVKAFKIHNKIWVIPERDTFTNPEEGDLNPPPEAKQVPVSYYDSTYLSTDNEKDNYLKGVTKLFERIYSTELGRMLLTSIVRGIPFWGGSTIDTELKVIDTNCINVIQPDGSYRSEELNLVIIGPSADIIQFECKSFGHDVLNLTRNGYGSTQYIRFSPDFTFGFEESLEVDTNPLLGAGKFATDPAVTLAHELIHAGHRLYGIAINPNRVFKVNTNAYYEMSGLEVSFEELRTFGEHDAKFIDSLQENEFRLYYYNKFKDIASTLNKAKSIVGTTASLQYMKNVFKEKYLLSEDTSGKFSVDKLKFDKLYKMLTEIYTEDNFVKFFKVLNRKTYLNFDKAVFKINIVPEVNYTIYDGFNLRNTNLAANFNGQNTEINNMNFTKLKNFTGLFEFYKLLCVRGIITSKTKSLDEGYNKALNDLCIKVNNWDLFFSPSEDNFTNDLNKGEEITSDTNIEAAEENISLDLIQQYYLTFNFDNEPENISIENLSSDIIGQLELMPNIERFPNGKKYELDKYTMFHYLRAQEFEHGKSRIVLTNSVNEALLNPSSVYTFFSSDYVRKVNKATEAAMFLGWVEQLVYDFTDETSEVSTTDKIADITIIIPYIGPALNIGNMLYKDDFVGALIFSGAVILLEFIPEIAIPVLGTFALVSYIANKVLTVQTIDNALSKRNEKWGEVYKYIVTNWLAKVNTQIDLIRKKMKEALENQAEATKAIINYQYNQYTEEEKNNINFNIGDLSSKLNDSINKAMININKFLNQCSVSYLMNSMIPYGVKRLEDFDASLKDALLKYIYDNRGTLIGQVDRLKDKVNNTLSTDIPFQLSKYVDNQRLLSTFTEYIKN

SEQ ID NO: 34 - protein, 872 aa, Artificial Sequence
  Synthetic polypeptide
MPFVNKQFNYKDPVNGVDIAYIKIPNAGQMQPVKAFKIHNKIWVIPERDTFTNPEEGDLNPPPEAKQVPVSYYDSTYLSTDNEKDNYLKGVTKLFERIYSTDLGRMLLTSIVRGIPFWGGSTIDTELKVIDTNCINVIQPDGSYRSEELNLVIIGPSADIIQFECKSFGHEVLNLTRNGYGSTQYIRFSPDFTFGFEESLEVDTNPLLGAGKFATDPAVTLAHELIHAGHRLYGIAINPNRVFKVNTNAYYEMSGLEVSFEELRTFGGHDAKFIDSLQENEFRLYYYNKFKDIASTLNKAKSIVGTTASLQYMKNVFKEKYLLSEDTSGKFSVDKLKFDKLYKMLTEIYTEDNFVKFFKVLNRKTYLNFDKAVFKINIVPKVNYTIYDGFNLRNTNLAANFNGQNTEINNMNFAKLKNFTGLFEFYKLLCVRGIITSKTKSLDKGYNKALNDLCIKVNNWDLFFSPSEDNFTNDLNKGEEITSDTNIEAAEENISLDLIQQYYLTFNFDNEPENISIENLSSDIIGQLELMPNIERFPNGKKYELDKYTMFHYLSAQEFEHGKSRIDLTNSVNEALLNPSHVYTFFSSDYVKKVNKATEAAMFLGWVEQLVYDFTDETSEVSTTDKIADITIIIPYIGPALNIGNMLYKDDFVGALIFSGAVILLEFIPEIAIPVLGTFAIVSYIANKVLTVQTINNALSKRNEKWDEVYKYTVTNWLAKVNTQIDLIREKMKKALENQAEATKAIINYQYNQYTEEEKNNINFNIDDLSSKLNESINSAMININKFLDQCSVSYLMNSMIPYAVKRLKDFDASVRDVLLKYIYDNRGTLIGQVDRLKDKVNNTLSTDIPFQLSKYVDNQRLLSTFTEYIKN

SEQ ID NO: 35 - protein, 872 aa, Artificial Sequence
  Synthetic polypeptide
MPFVNKQFNYKDPVNGVDIAYIKIPNAGQMQPVKAFKIHNKIWVIPERDIFTNPEEGDLNPPPEAKQVPVSYYDSTYLSTDNEKDNYLKGVTKLFERIYSTDLGRMLLTSIVRGIPFWGGSTIDTELKVIDTNCINVIQPDGSYRSEELNLVIIGPSADIINFECKSFGHDVLNLTRNGYGSTQYIRFSPDFTFGFEESLEVDTNPLLGAGKFAIDPAVTLAHELIHAGHRLYGIAINPNRVFKVNTNAYYEMSGLEVSFEELRTFGGHDAKFIDSLQENEFRLYYYNKFKEVASILNKAKSIIGTTASLQYMKNVFKEKYLLSEDTSGKFSVDKLRFDKLYKMLTEIYTEDNFVKFFKVLNRKTYLNFDKAVFKMNIVPEVNYTIYDGFNLRNTNLAANFNGQNTEINNMNFTKLKNFTGLFEFYKLLCVRGIITSKTKSLDEGYNKALNDLCIKVNNWDLFFSPSEDNFTNDLNKGEEITSDTNIEAAEENISSDLIQQYYLTFNFDNEPENISIENLSSDIIGQLELMPNIERFPNGKKYELDKYTMFHYLRAQEFEYGNSRIVLINSVNEALLNPSSVYTFFSSDYVKKANEATEAAMFLGWVEQLVYDFTDETSEVSTMDKIADITIIVPYIGPALNIGNMVYKKKFEEALIFSGAVILLEFVPEIVLPILGTFALVSYTSNKVLTVRTIDNALSKRNEKWEEVYKYIVTNWLAKVNTQINLIRKKMKEALENQAEATKAIINYQYNQYTEEEKNNINFNIGDLSSKLNDSINKAMININKFLDQCSVSYLMNSMIPQGVKQLKDFDTSLRDSLLKYIYDNRGTLIGQVDRLKDKVNNTLSTDIPFQLSKYADNQRLLSTFTEYIKN

SEQ ID NO: 36 - protein, 872 aa, Artificial Sequence
  Synthetic polypeptide
MPFVNKQFNYKDTVNGIDIAYIKIPNAGQMQPVKAFKIHNKIWVIPERDTFTNPKEGDLNPPPEAKQVPVSYYDSTYLSTDNEKDNYLKGVTKLFERIYSTDLGRMLLTSIVRGIPFWGGSTIDTELKVIDTNCINVIQPDGSYRSEELNLVIIGPSADIIQFECKSFGHDVLNLTRNGYGSTQYIRFSPDFTFGFEESLEVDTNPLLGAGKFATDPAVTLAHELIHAEHRLYGIAINPNRVFKVNTNAYYEMSGLEVSFEELRTFGGHNAKFIDSLQENEFRLYYYNKFKDIASTLNKAKSIVGTTASLQYMKNVFKEKYLLSEDTSGKFSVDKLKFDKLYKMLTEIYTEDNFVKFFKVLNRKTYLNFDKAVFKINIVPDENYTIKDGFNLKNTNLAANFNGQNTEINSRNFTKLKNFTGLFEFYKLLCVRGIIPFKTKSLDEGYNKALNDLCIKVNNWDLFFSPSEDNFTNDLDKVEEITSDTNIEAAEENISLDLIQQYYLTFDFDNEPENISIENLSSDIIGQLEPMPNIERFPNGKKYELDKYTMFHYLRAQEFEHSKSRIALTNSVNEALLNPSRVYTFFSSDYVKKVNKATEAAMFLGWVEQLVYDFTDETSEVSTTDKIADITIIIPYIGPALNIGNMLYKDDFVGALIFSGAVILLEFIPEIAIPVLGTFALVSYIANKVLTVQTIDNALSKRNEKWDEVYKYIVTNWLAKVNTQIDLVRKKMKEALENQAEATKAIINYQYNQYTEEEKNNINFNIDDLSSKLNESINSAMTNINKFLDQCSVSYLMNSMIPYAVKRLKDFDASVREVLLKYIYDNRGTLILQVDRLKDKVNNTLSADIPFQLSKYVDNKKLLSTFTEYIKN

SEQ ID NO: 37 - protein, 1291 aa, Artificial Sequence
  Synthetic polypeptide
MPVTINNFNYNDPIDNNNIIMMEPPFARGTGRYYKAFKITDRIWIIPERYTFGYKPEDFNKSSGIFNRDVCEYYDPDYLNTNDKKNIFLQTMIKLFNRIKSKPLGEKLLEMIINGIPYLGDRRVPLEEFNTNIASVTVNKLISNPGEVERKKGIFANLIIFGPGPVLNENETIDIGIQNHFASREGFGGIMQMKFCPEYVSVFNNVQENKGASIFNRRGYFSDPALILMHELIHVLHGLYGIKVDDLPIVPNEKKFFMQSTDAIQAEELYTFGGQDPSIITPSTDKSIYDKVLQNFRGIVDRLNKVLVCISDPNININIYKNKFKDKYKFVEDSEGKYSIDVESFDKLYKSLMFGFTETNIAENYKIKTRASYFSDSLPPVKIKNLLDNEIYTIEEGFNISDKDMEKEYRGQNKAINKQAYEEISKEHLAVYKIQMCKSVKAPGICIDVDNEDLFFIADKNSFSDDLSKNERIEYNTQSNYIENDFPINELILDTDLISKIELPSENTESLTDFNVDVPVYEKQPAIKKIFTDENTIFQYLYSQTFPLDIRDISLTSSFDDALLFSNKVYSFFSMDYIKTANKVVEAGLFAGWVKQIVNDFVIEANKSNTMDKIADISLIVPYIGLALNVGNETAKGNFENAFEIAGASILLEFIPELLIPVVGAFLLESYIDNKNKIIKTIDNALTKRNEKWSDMYGLIVAQWLSTVNTQFYTIKEGMYKALNYQAQALEEIIKYRYNIYSEKEKSNINIDFNDINSKLNEGINQAIDNINNFINGCSVSYLMKKMIPLAVEKLLDFDNTLKKNLLNYIDENKLYLIGSAEYEKSKVNKYLKTIMPFDLSIYTNDTILIEMFNKYNSEILNNIILNLRYKDNNLIDLSGYGAKVEVYDGVELNDKNQFKLTSSANSKIRVTQNQNIIFNSVFLDFSVSFWIRIPKYKNDGIQNYIHNEYTIINCMKNNSGWKISIRGNRIIWTLIDINGKTKSVFFEYNIREDISEYINRWFFVTITNNLNNAKIYINGKLESNTDIKDIREVIANGEIIFKLDGDIDRTQFIWMKYFSIFNTELSQSNIEERYKIQSYSEYLKDFWGNPLMYNKEYYMFNAGNKNSYIKLKKDSPVGEILTRSKYNQNSKYINYRDLYIGEKFIIRRKSNSQSINDDIVRKEDYIYLDFFNLNQEWRVYTYKYFKKEEMKLFLAPIYDSDEFYNTIQIKEYDEQPTYSCQLLFKKDEESTDEIGLIGIHRFYESGWWFEEYKDYFCISKWYLKEVKRKPYNLKLGCNWQFIPKDEGWTE

SEQ ID NO: 38 - protein, 1291 aa, Artificial Sequence
  Synthetic polypeptide
MPVTINNFNYNDPIDNNNIIMMEPPFARGTGRYYKAFKITDRIWIIPERYTFGYKPEDFNKSSGIFNRDVCEYYDPDYLNTNDKKNIFLQTMIKLFNRIKSKPLGEKLLEMIINGIPYLGDRRVPLEEFNTNIASVTVNKLISNPGEVERKKGIFANLIIFGPGPVLNENETIDIGIQNHFASREGFGGIMQMKFCPEYVSVFNNVQENKGASIFNRRGYFSDPALILMHELIHVLHGLYGIKVDDLPIVPNEKKFFMQSTDAIQAEELYTFGGQDPSIITPSTDKSIYDKVLQNFRGIVDRLNKVLVCISDPNININIYKNKFKDKYKFVEDSEGKYSIDVESFDKLYKSLMFGFTETNIAENYKIKTRASYFSDSLPPVKIKNLLDNEIYTIEEGFNISDKDMEKEYRGQNKAINKQAYEEISKEHLAVYKIQMCKSVKAPGICIDVDNEDLFFIADKNSFSDDLSKNERIEYNTQSNYIENDFPINELILDTDLISKIELPSENTESLTDFNVDVPVYEKQPAIKKIFTDENTIFQYLYSQTFPLDIRDISLTSSFDDALLFSNKVYSFFSMDYIKTANKVVEAGLFAGWVKQIVNDFVIEANKSNTMDKIADISLIVPYIGLALNVGNETAKGNFENAFEIAGASILLEFIPELLIPVVGAFLLESYIDNKNKIIKTIDNALTKRNEKWSDMYGLIVAQWLSTVNTQFYTIKEGMYKALNYQAQALEEIIKYRYNIYSEKEKSNINIDFNDINSKLNEGINQAIDNINNFINGCSVSYLMKKMIPLAVEKLLDFDNTLKKNLLNYIDENKLYLIGSAEYEKSKVNKYLKTIMPFDLSIYTNDTILIEMFNKYNSEILNNIILNLRYKDNNLIDLSGYGAKVEVYDGVELNDKNQFKLTSSANSKIRVTQNQNIIFNSVFLDFSVSFWIRIPKYKNDGIQNYIHNEYTIINCMKNNSGWKISIRGNRIIWTLIDINGKTKSVFFEYNIREDISEYINRWFFVTITNNLNNAKIYINGKLESNTDIKDIREVIANGEIIFKLDGDIDRTQFIWMKYFSIFNTELSQSNIEERYKIQSYSEYLKDFWGNPLMYNKEYYMFNAGNKNSYIKLKKDSPVGEILTRSKYNQNSKYINYRDLYIGEKFIIRRKSNSQSINDDIVRKEDYIYLDFFNLNQEWRVYTYKYFKKEEMKLFLAPIWDSDEFYNTIQIKEYDEQPTYSCQLLFKKDEESTDEIGLIGIHRFYESGWWFEEYKDYFCISKWYLKEVKRKPYNLKLGCNWQFIPKDEGWTE

SEQ ID NO: 39 - protein, 1291 aa, Artificial Sequence
  Synthetic polypeptide
MPVTINNFNYNDPIDNNNIIMMEPPFARGTGRYYKAFKITDRIWIIPERYTFGYKPEDFNKSSGIFNRDVCEYYDPDYLNTNDKKNIFLQTMIKLFNRIKSKPLGEKLLEMIINGIPYLGDRRVPLEEFNTNIASVTVNKLISNPGEVERKKGIFANLIIFGPGPVLNENETIDIGIQNHFASREGFGGIMQMKFCPEYVSVFNNVQENKGASIFNRRGYFSDPALILMHELIHVLHGLYGIKVDDLPIVPNEKKFFMQSTDAIQAEELYTFGGQDPSIITPSTDKSIYDKVLQNFRGIVDRLNKVLVCISDPNININIYKNKFKDKYKFVEDSEGKYSIDVESFDKLYKSLMFGFTETNIAENYKIKTRASYFSDSLPPVKIKNLLDNEIYTIEEGFNISDKDMEKEYRGQNKAINKQAYEEISKEHLAVYKIQMCKSVKAPGICIDVDNEDLFFIADKNSFSDDLSKNERIEYNTQSNYIENDFPINELILDTDLISKIELPSENTESLTDFNVDVPVYEKQPAIKKIFTDENTIFQYLYSQTFPLDIRDISLTSSFDDALLFSNKVYSFFSMDYIKTANKVVEAGLFAGWVKQIVNDFVIEANKSNTMDKIADISLIVPYIGLALNVGNETAKGNFENAFEIAGASILLEFIPELLIPVVGAFLLESYIDNKNKIIKTIDNALTKRNEKWSDMYGLIVAQWLSTVNTQFYTIKEGMYKALNYQAQALEEIIKYRYNIYSEKEKSNINIDFNDINSKLNEGINQAIDNINNFINGCSVSYLMKKMIPLAVEKLLDFDNTLKKNLLNYIDENKLYLIGSAEYEKSKVNKYLKTIMPFDLSIYTNDTILIEMFNKYNSEILNNIILNLRYKDNNLIDLSGYGAKVEVYDGVELNDKNQFKLTSSANSKIRVTQNQNIIFNSVFLDFSVSFWIRIPKYKNDGIQNYIHNEYTIINCMKNNSGWKISIRGNRIIWTLIDINGKTKSVFFEYNIREDISEYINRWFFVTITNNLNNAKIYINGKLESNTDIKDIREVIANGEIIFKLDGDIDRTQFIWMKYFSIFNTELSQSNIEERYKIQSYSEYLKDFWGNPLMYNKEYYMFNAGNKNSYIKLKKDSPVGEILTRSKYNQNSKYINYRDLYIGEKFIIRRKSNSQSINDDIVRKEDYIYLDFFNLNQEQRVYTYKYFKKEEMKLFLAPISDSDEFYNTIQIKEYDEQPTYSCQLLFKKDEESTDEIGLIGIHRFYESGWWFEEYKDYFCISKWYLKEVKRKPYNLKLGCNWQFIPKDEGWTE

SEQ ID NO: 40 - protein, 1291 aa, Artificial Sequence
  Synthetic polypeptide
MPVTINNFNYNDPIDNNNIIMMEPPFARGTGRYYKAFKITDRIWIIPERYTFGYKPEDFNKSSGIFNRDVCEYYDPDYLNTNDKKNIFLQTMIKLFNRIKSKPLGEKLLEMIINGIPYLGDRRVPLEEFNTNIASVTVNKLISNPGEVERKKGIFANLIIFGPGPVLNENETIDIGIQNHFASREGFGGIMQMKFCPEYVSVFNNVQENKGASIFNRRGYFSDPALILMHELIHVLHGLYGIKVDDLPIVPNEKKFFMQSTDAIQAEELYTFGGQDPSIITPSTDKSIYDKVLQNFRGIVDRLNKVLVCISDPNININIYKNKFKDKYKFVEDSEGKYSIDVESFDKLYKSLMFGFTETNIAENYKIKTRASYFSDSLPPVKIKNLLDNEIYTIEEGFNISDKDMEKEYRGQNKAINKQAYEEISKEHLAVYKIQMCKSVKAPGICIDVDNEDLFFIADKNSFSDDLSKNERIEYNTQSNYIENDFPINELILDTDLISKIELPSENTESLTDFNVDVPVYEKQPAIKKIFTDENTIFQYLYSQTFPLDIRDISLTSSFDDALLFSNKVYSFFSMDYIKTANKVVEAGLFAGWVKQIVNDFVIEANKSNTMDKIADISLIVPYIGLALNVGNETAKGNFENAFEIAGASILLEFIPELLIPVVGAFLLESYIDNKNKIIKTIDNALTKRNEKWSDMYGLIVAQWLSTVNTQFYTIKEGMYKALNYQAQALEEIIKYRYNIYSEKEKSNINIDFNDINSKLNEGINQAIDNINNFINGCSVSYLMKKMIPLAVEKLLDFDNTLKKNLLNYIDENKLYLIGSAEYEKSKVNKYLKTIMPFDLSIYTNDTILIEMFNKYNSEILNNIILNLRYKDNNLIDLSGYGAKVEVYDGVELNDKNQFKLTSSANSKIRVTQNQNIIFNSVFLDFSVSFWIRIPKYKNDGIQNYIHNEYTIINCMKNNSGWKISIRGNRIIWTLIDINGKTKSVFFEYNIREDISEYINRWFFVTITNNLNNAKIYINGKLESNTDIKDIREVIANGEIIFKLDGDIDRTQFIWMKYFSIFNTELSQSNIEERYKIQSYSEYLKDFWGNPLMYNKEYYMFNAGNKNSYIKLKKDSPVGEILTRSKYNQNSKYINYRDLYIGEKFIIRRKSNSQSINDDIVRKEDYIYLDFFNLNQEWRVYTYKYFKKEEVKLFLAPIYDSDEFYNTIQIKEYDEQPTYSCQLLFKKDEESTDEIGLIGIHRFYESGWWFEEYKDYFCISKWYLKEVKRKPYNLKLGCNWQFIPKDEGWTE

SEQ ID NO: 41 - protein, 1291 aa, Artificial Sequence
  Synthetic polypeptide
MPVTINNFNYNDPIDNNNIIMMEPPFARGTGRYYKAFKITDRIWIIPERYTFGYKPEDFNKSSGIFNRDVCEYYDPDYLNTNDKKNIFLQTMIKLFNRIKSKPLGEKLLEMIINGIPYLGDRRVPLEEFNTNIASVTVNKLISNPGEVERKKGIFANLIIFGPGPVLNENETIDIGIQNHFASREGFGGIMQMKFCPEYVSVFNNVQENKGASIFNRRGYFSDPALILMHELIHVLHGLYGIKVDDLPIVPNEKKFFMQSTDAIQAEELYTFGGQDPSIITPSTDKSIYDKVLQNFRGIVDRLNKVLVCISDPNININIYKNKFKDKYKFVEDSEGKYSIDVESFDKLYKSLMFGFTETNIAENYKIKTRASYFSDSLPPVKIKNLLDNEIYTIEEGFNISDKDMEKEYRGQNKAINKQAYEEISKEHLAVYKIQMCKSVKAPGICIDVDNEDLFFIADKNSFSDDLSKNERIEYNTQSNYIENDFPINELILDTDLISKIELPSENTESLTDFNVDVPVYEKQPAIKKIFTDENTIFQYLYSQTFPLDIRDISLTSSFDDALLFSNKVYSFFSMDYIKTANKVVEAGLFAGWVKQIVNDFVIEANKSNTMDKIADISLIVPYIGLALNVGNETAKGNFENAFEIAGASILLEFIPELLIPVVGAFLLESYIDNKNKIIKTIDNALTKRNEKWSDMYGLIVAQWLSTVNTQFYTIKEGMYKALNYQAQALEEIIKYRYNIYSEKEKSNINIDFNDINSKLNEGINQAIDNINNFINGCSVSYLMKKMIPLAVEKLLDFDNTLKKNLLNYIDENKLYLIGSAEYEKSKVNKYLKTIMPFDLSIYTNDTILIEMFNKYNSEILNNIILNLRYKDNNLIDLSGYGAKVEVYDGVELNDKNQFKLTSSANSKIRVTQNQNIIFNSVFLDFSVSFWIRIPKYKNDGIQNYIHNEYTIINCMKNNSGWKISIRGNRIIWTLIDINGKTKSVFFEYNIREDISEYINRWFFVTITNNLNNAKIYINGKLESNTDIKDIREVIANGEIIFKLDGDIDRTQFIWMKYFSIFNTELSQSNIEERYKIQSYSEYLKDFWGNPLMYNKEYYMFNAGNKNSYIKLKKDSPVGEILTRSKYNQNSKYINYRDLYIGEKFIIRRKSNSQSINDDIVRKEDYIYLDFFNLNQEWRVYTYKYFKKEEVKLFLAPIWDSDEFYNTIQIKEYDEQPTYSCQLLFKKDEESTDEIGLIGIHRFYESGWWFEEYKDYFCISKWYLKEVKRKPYNLKLGCNWQFIPKDEGWTE

SEQ ID NO: 42 - protein, 1291 aa, Artificial Sequence
  Synthetic polypeptide
MPVTINNFNYNDPIDNNNIIMMEPPFARGTGRYYKAFKITDRIWIIPERYTFGYKPEDFNKSSGIFNRDVCEYYDPDYLNTNDKKNIFLQTMIKLFNRIKSKPLGEKLLEMIINGIPYLGDRRVPLEEFNTNIASVTVNKLISNPGEVERKKGIFANLIIFGPGPVLNENETIDIGIQNHFASREGFGGIMQMKFCPEYVSVFNNVQENKGASIFNRRGYFSDPALILMHELIHVLHGLYGIKVDDLPIVPNEKKFFMQSTDAIQAEELYTFGGQDPSIITPSTDKSIYDKVLQNFRGIVDRLNKVLVCISDPNININIYKNKFKDKYKFVEDSEGKYSIDVESFDKLYKSLMFGFTETNIAENYKIKTRASYFSDSLPPVKIKNLLDNEIYTIEEGFNISDKDMEKEYRGQNKAINKQAYEEISKEHLAVYKIQMCKSVKAPGICIDVDNEDLFFIADKNSFSDDLSKNERIEYNTQSNYIENDFPINELILDTDLISKIELPSENTESLTDFNVDVPVYEKQPAIKKIFTDENTIFQYLYSQTFPLDIRDISLTSSFDDALLFSNKVYSFFSMDYIKTANKVVEAGLFAGWVKQIVNDFVIEANKSNTMDKIADISLIVPYIGLALNVGNETAKGNFENAFEIAGASILLEFIPELLIPVVGAFLLESYIDNKNKIIKTIDNALTKRNEKWSDMYGLIVAQWLSTVNTQFYTIKEGMYKALNYQAQALEEIIKYRYNIYSEKEKSNINIDFNDINSKLNEGINQAIDNINNFINGCSVSYLMKKMIPLAVEKLLDFDNTLKKNLLNYIDENKLYLIGSAEYEKSKVNKYLKTIMPFDLSIYTNDTILIEMFNKYNSEILNNIILNLRYKDNNLIDLSGYGAKVEVYDGVELNDKNQFKLTSSANSKIRVTQNQNIIFNSVFLDFSVSFWIRIPKYKNDGIQNYIHNEYTIINCMKNNSGWKISIRGNRIIWTLIDINGKTKSVFFEYNIREDISEYINRWFFVTITNNLNNAKIYINGKLESNTDIKDIREVIANGEIIFKLDGDIDRTQFIWMKYFSIFNTELSQSNIEERYKIQSYSEYLKDFWGNPLMYNKEYYMFNAGNKNSYIKLKKDSPVGEILTRSKYNQNSKYINYRDLYIGEKFIIRRKSNSQSINDDIVRKEDYIYLDFFNLNQEQRVYTYKYFKKEEVKLFLAPISDSDEFYNTIQIKEYDEQPTYSCQLLFKKDEESTDEIGLIGIHRFYESGWWFEEYKDYFCISKWYLKEVKRKPYNLKLGCNWQFIPKDEGWTE

SEQ ID NO: 43 - protein, 1291 aa, Artificial Sequence
  Synthetic polypeptide
MPVTINNFNYNDPIDNNNIIMMEPPFARGTGRYYKAFKITDRIWIIPERYTFGYKPEDFNKSSGIFNRDVCEYYDPDYLNTNDKKNIFLQTMIKLFNRIKSKPLGEKLLEMIINGIPYLGDRRVPLEEFNTNIASVTVNKLISNPGEVERKKGIFANLIIFGPGPVLNENETIDIGIQNHFASREGFGGIMQMKFCPEYVSVFNNVQENKGASIFNRRGYFSDPALILMHELIHVLHGLYGIKVDDLPIVPNEKKFFMQSTDAIQAEELYTFGGQDPSIITPSTDKSIYDKVLQNFRGIVDRLNKVLVCISDPNININIYKNKFKDKYKFVEDSEGKYSIDVESFDKLYKSLMFGFTETNIAENYKIKTRASYFSDSLPPVKIKNLLDNEIYTIEEGFNISDKDMEKEYRGQNKAINKQAYEEISKEHLAVYKIQMCKSVKAPGICIDVDNEDLFFIADKNSFSDDLSKNERIEYNTQSNYIENDFPINELILDTDLISKIELPSENTESLTDFNVDVPVYEKQPAIKKIFTDENTIFQYLYSQTFPLDIRDISLTSSFDDALLFSNKVYSFFSMDYIKTANKVVEAGLFAGWVKQIVNDFVIEANKSNTMDKIADISLIVPYIGLALNVGNETAKGNFENAFEIAGASILLEFIPELLIPVVGAFLLESYIDNKNKIIKTIDNALTKRNEKWSDMYGLIVAQWLSTVNTQFYTIKEGMYKALNYQAQALEEIIKYRYNIYSEKEKSNINIDFNDINSKLNEGINQAIDNINNFINGCSVSYLMKKMIPLAVEKLLDFDNTLKKNLLNYIDENKLYLIGSAEYEKSKVNKYLKTIMPFDLSIYTNDTILIEMFNKYNSEILNNIILNLRYKDNNLIDLSGYGAKVEVYDGVELNDKNQFKLTSSANSKIRVTQNQNIIFNSVFLDFSVSFWIRIPKYKNDGIQNYIHNEYTIINCMKNNSGWKISIRGNRIIWTLIDINGKTKSVFFEYNIREDISEYINRWFFVTITNNLNNAKIYINGKLESNTDIKDIREVIANGEIIFKLDGDIDRTQFIWMKYFSIFNTELSQSNIEERYKIQSYSEYLKDFWGNPLMYNKEYYMFNAGNKNSYIKLKKDSPVGEILTRSKYNQNSKYINYRDLYIGEKFIIRRKSNSQSINDDIVRKEDYIYLDFFNLNQEWRVYTYKYFKKEEQKLFLAPIYDSDEFYNTIQIKEYDEQPTYSCQLLFKKDEESTDEIGLIGIHRFYESGWWFEEYKDYFCISKWYLKEVKRKPYNLKLGCNWQFIPKDEGWTE

SEQ ID NO: 44 - protein, 432 aa, Artificial Sequence
  Synthetic polypeptide
ILNNIILNLRYKDNNLIDLSGYGAKVEVYDGVELNDKNQFKLTSSANSKIRVTQNQNIIFNSVFLDFSVSFWIRIPKYKNDGIQNYIHNEYTIINCMKNNSGWKISIRGNRIIWTLIDINGKTKSVFFEYNIREDISEYINRWFFVTITNNLNNAKIYINGKLESNTDIKDIREVIANGEIIFKLDGDIDRTQFIWMKYFSIFNTELSQSNIEERYKIQSYSEYLKDFWGNPLMYNKEYYMFNAGNKNSYIKLKKDSPVGEILTRSKYNQNSKYINYRDLYIGEKFIIRRKSNSQSINDDIVRKEDYIYLDFFNLNQEWRVYTYKYFKKEEMKLFLAPIYDSDEFYNTIQIKEYDEQPTYSCQLLFKKDEESTDEIGLIGIHRFYESGWWFEEYKDYFCISKWYLKEVKRKPYNLKLGCNWQFIPKDEGWTE

SEQ ID NO: 45 - protein, 432 aa, Artificial Sequence
  Synthetic polypeptide
ILNNIILNLRYKDNNLIDLSGYGAKVEVYDGVELNDKNQFKLTSSANSKIRVTQNQNIIFNSVFLDFSVSFWIRIPKYKNDGIQNYIHNEYTIINCMKNNSGWKISIRGNRIIWTLIDINGKTKSVFFEYNIREDISEYINRWFFVTITNNLNNAKIYINGKLESNTDIKDIREVIANGEIIFKLDGDIDRTQFIWMKYFSIFNTELSQSNIEERYKIQSYSEYLKDFWGNPLMYNKEYYMFNAGNKNSYIKLKKDSPVGEILTRSKYNQNSKYINYRDLYIGEKFIIRRKSNSQSINDDIVRKEDYIYLDFFNLNQEWRVYTYKYFKKEEMKLFLAPIWDSDEFYNTIQIKEYDEQPTYSCQLLFKKDEESTDEIGLIGIHRFYESGWWFEEYKDYFCISKWYLKEVKRKPYNLKLGCNWQFIPKDEGWTE

SEQ ID NO: 46 - protein, 432 aa, Artificial Sequence
  Synthetic polypeptide
ILNNIILNLRYKDNNLIDLSGYGAKVEVYDGVELNDKNQFKLTSSANSKIRVTQNQNIIFNSVFLDFSVSFWIRIPKYKNDGIQNYIHNEYTIINCMKNNSGWKISIRGNRIIWTLIDINGKTKSVFFEYNIREDISEYINRWFFVTITNNLNNAKIYINGKLESNTDIKDIREVIANGEIIFKLDGDIDRTQFIWMKYFSIFNTELSQSNIEERYKIQSYSEYLKDFWGNPLMYNKEYYMFNAGNKNSYIKLKKDSPVGEILTRSKYNQNSKYINYRDLYIGEKFIIRRKSNSQSINDDIVRKEDYIYLDFFNLNQEQRVYTYKYFKKEEMKLFLAPISDSDEFYNTIQIKEYDEQPTYSCQLLFKKDEESTDEIGLIGIHRFYESGWWFEEYKDYFCISKWYLKEVKRKPYNLKLGCNWQFIPKDEGWTE

SEQ ID NO: 47 - protein, 432 aa, Artificial Sequence
  Synthetic polypeptide
ILNNIILNLRYKDNNLIDLSGYGAKVEVYDGVELNDKNQFKLTSSANSKIRVTQNQNIIFNSVFLDFSVSFWIRIPKYKNDGIQNYIHNEYTIINCMKNNSGWKISIRGNRIIWTLIDINGKTKSVFFEYNIREDISEYINRWFFVTITNNLNNAKIYINGKLESNTDIKDIREVIANGEIIFKLDGDIDRTQFIWMKYFSIFNTELSQSNIEERYKIQSYSEYLKDFWGNPLMYNKEYYMFNAGNKNSYIKLKKDSPVGEILTRSKYNQNSKYINYRDLYIGEKFIIRRKSNSQSINDDIVRKEDYIYLDFFNLNQEQRVYTYKYFKKEEVKLFLAPISDSDEFYNTIQIKEYDEQPTYSCQLLFKKDEESTDEIGLIGIHRFYESGWWFEEYKDYFCISKWYLKEVKRKPYNLKLGCNWQFIPKDEGWTE

SEQ ID NO: 48 - protein, 432 aa, Artificial Sequence
  Synthetic polypeptide
ILNNIILNLRYKDNNLIDLSGYGAKVEVYDGVELNDKNQFKLTSSANSKIRVTQNQNIIFNSVFLDFSVSFWIRIPKYKNDGIQNYIHNEYTIINCMKNNSGWKISIRGNRIIWTLIDINGKTKSVFFEYNIREDISEYINRWFFVTITNNLNNAKIYINGKLESNTDIKDIREVIANGEIIFKLDGDIDRTQFIWMKYFSIFNTELSQSNIEERYKIQSYSEYLKDFWGNPLMYNKEYYMFNAGNKNSYIKLKKDSPVGEILTRSKYNQNSKYINYRDLYIGEKFIIRRKSNSQSINDDIVRKEDYIYLDFFNLNQEWRVYTYKYFKKEEVKLFLAPIYDSDEFYNTIQIKEYDEQPTYSCQLLFKKDEESTDEIGLIGIHRFYESGWWFEEYKDYFCISKWYLKEVKRKPYNLKLGCNWQFIPKDEGWTE

SEQ ID NO: 49 - protein, 432 aa, Artificial Sequence
  Synthetic polypeptide
ILNNIILNLRYKDNNLIDLSGYGAKVEVYDGVELNDKNQFKLTSSANSKIRVTQNQNIIFNSVFLDFSVSFWIRIPKYKNDGIQNYIHNEYTIINCMKNNSGWKISIRGNRIIWTLIDINGKTKSVFFEYNIREDISEYINRWFFVTITNNLNNAKIYINGKLESNTDIKDIREVIANGEIIFKLDGDIDRTQFIWMKYFSIFNTELSQSNIEERYKIQSYSEYLKDFWGNPLMYNKEYYMFNAGNKNSYIKLKKDSPVGEILTRSKYNQNSKYINYRDLYIGEKFIIRRKSNSQSINDDIVRKEDYIYLDFFNLNQEWRVYTYKYFKKEEVKLFLAPIWDSDEFYNTIQIKEYDEQPTYSCQLLFKKDEESTDEIGLIGIHRFYESGWWFEEYKDYFCISKWYLKEVKRKPYNLKLGCNWQFIPKDEGWTE

SEQ ID NO: 50 - protein, 432 aa, Artificial Sequence
  Synthetic polypeptide
ILNNIILNLRYKDNNLIDLSGYGAKVEVYDGVELNDKNQFKLTSSANSKIRVTQNQNIIFNSVFLDFSVSFWIRIPKYKNDGIQNYIHNEYTIINCMKNNSGWKISIRGNRIIWTLIDINGKTKSVFFEYNIREDISEYINRWFFVTITNNLNNAKIYINGKLESNTDIKDIREVIANGEIIFKLDGDIDRTQFIWMKYFSIFNTELSQSNIEERYKIQSYSEYLKDFWGNPLMYNKEYYMFNAGNKNSYIKLKKDSPVGEILTRSKYNQNSKYINYRDLYIGEKFIIRRKSNSQSINDDIVRKEDYIYLDFFNLNQEWRVYTYKYFKKEEQKLFLAPIYDSDEFYNTIQIKEYDEQPTYSCQLLFKKDEESTDEIGLIGIHRFYESGWWFEEYKDYFCISKWYLKEVKRKPYNLKLGCNWQFIPKDEGWTE

SEQ ID NO: 51 - protein, 1304 aa, Artificial Sequence
  Synthetic polypeptide
MPFVNKQFNYKDPVNGVDIAYIKIPNAGQMQPVKAFKIHNKIWVIPERDTFTNPEEGDLNPPPEAKQVPVSYYDSTYLSTDNEKDNYLKGVTKLFERIYSTDLGRMLLTSIVRGIPFWGGSTIDTELKVIDTNCINVIQPDGSYRSEELNLVIIGPSADIIQFECKSFGHEVLNLTRNGYGSTQYIRFSPDFTFGFEESLEVDTNPLLGAGKFATDPAVTLAHELIHAGHRLYGIAINPNRVFKVNTNAYYEMSGLEVSFEELRTFGGHDAKFIDSLQENEFRLYYYNKFKDIASTLNKAKSIVGTTASLQYMKNVFKEKYLLSEDTSGKFSVDKLKFDKLYKMLTEIYTEDNFVKFFKVLNRKTYLNFDKAVFKINIVPKVNYTIYDGFNLRNTNLAANFNGQNTEINNMNFTKLKNFTGLFEFYKLLCVRGIITSKTKSLDKGYNKALNDLCIKVNNWDLFFSPSEDNFTNDLNKGEEITSDTNIEAAEENISLDLIQQYYLTFNFDNEPENISIENLSSDIIGQLELMPNIERFPNGKKYELDKYTMFHYLRAQEFEHGKSRIALTNSVNEALLNPSRVYTFFSSDYVKKVNKATEAAMFLGWVEQLVYDFTDETSEVSTTDKIADITIIIPYIGPALNIGNMLYKDDFVGALIFSGAVILLEFIPEIAIPVLGTFALVSYIANKVLTVQTIDNALSKRNEKWDEVYKYIVTNWLAKVNTQIDLIRKKMKEALENQAEATKAIINYQYNQYTEEEKNNINFNIDDLSSKLNESINKAMININKFLNQCSVSYLMNSMIPYGVKRLEDFDASLKDALLKYIYDNRGTLIGQVDRLKDKVNNTLSTDIPFQLSKYVDNQRLLSTFTEYIKNILNNIILNLRYKDNNLIDLSGYGAKVEVYDGVELNDKNQFKLTSSANSKIRVTQNQNIIFNSVFLDFSVSFWIRIPKYKNDGIQNYIHNEYTIINCMKNNSGWKISIRGNRIIWTLIDINGKTKSVFFEYNIREDISEYINRWFFVTITNNLNNAKIYINGKLESNTDIKDIREVIANGEIIFKLDGDIDRTQFIWMKYFSIFNTELSQSNIEERYKIQSYSEYLKDFWGNPLMYNKEYYMFNAGNKNSYIKLKKDSPVGEILTRSKYNQNSKYINYRDLYIGEKFIIRRKSNSQSINDDIVRKEDYIYLDFFNLNQEWRVYTYKYFKKEEMKLFLAPIYDSDEFYNTIQIKEYDEQPTYSCQLLFKKDEESTDEIGLIGIHRFYESGWWFEEYKDYFCISKWYLKEVKRKPYNLKLGCNWQFIPKDEGWTE

SEQ ID NO: 52 - protein, 1304 aa, Artificial Sequence
  Synthetic polypeptide
MPFVNKQFNYKDPVNGVDIAYIKIPNAGQMQPVKAFKIHNKIWVIPERDTFTNPEEGDLNPPPEAKQVPVSYYDSTYLSTDNEKDNYLKGVTKLFERIYSTDLGRMLLTSIVRGIPFWGGSTIDTELKVIDTNCINVIQPDGSYRSEELNLVIIGPSADIIQFECKSFGHEVLNLTRNGYGSTQYIRFSPDFTFGFEESLEVDTNPLLGAGKFATDPAVTLAHELIHAGHRLYGIAINPNRVFKVNTNAYYEMSGLEVSFEELRTFGGHDAKFIDSLQENEFRLYYYNKFKDIASTLNKAKSIVGTTASLQYMKNVFKEKYLLSEDTSGKFSVDKLKFDKLYKMLTEIYTEDNFVKFFKVLNRKTYLNFDKAVFKINIVPKVNYTIYDGFNLRNTNLAANFNGQNTEINNMNFTKLKNFTGLFEFYKLLCVRGIITSKTKSLDKGYNKALNDLCIKVNNWDLFFSPSEDNFTNDLNKGEEITSDTNIEAAEENISLDLIQQYYLTFNFDNEPENISIENLSSDIIGQLELMPNIERFPNGKKYELDKYTMFHYLRAQEFEHGKSRIALTNSVNEALLNPSRVYTFFSSDYVKKVNKATEAAMFLGWVEQLVYDFTDETSEVSTTDKIADITIIIPYIGPALNIGNMLYKDDFVGALIFSGAVILLEFIPEIAIPVLGTFALVSYIANKVLTVQTIDNALSKRNEKWDEVYKYIVTNWLAKVNTQIDLIRKKMKEALENQAEATKAIINYQYNQYTEEEKNNINFNIDDLSSKLNESINKAMININKFLNQCSVSYLMNSMIPYGVKRLEDFDASLKDALLKYIYDNRGTLIGQVDRLKDKVNNTLSTDIPFQLSKYVDNQRLLSTFTEYIKNILNNIILNLRYKDNNLIDLSGYGAKVEVYDGVELNDKNQFKLTSSANSKIRVTQNQNIIFNSVFLDFSVSFWIRIPKYKNDGIQNYIHNEYTIINCMKNNSGWKISIRGNRIIWTLIDINGKTKSVFFEYNIREDISEYINRWFFVTITNNLNNAKIYINGKLESNTDIKDIREVIANGEIIFKLDGDIDRTQFIWMKYFSIFNTELSQSNIEERYKIQSYSEYLKDFWGNPLMYNKEYYMFNAGNKNSYIKLKKDSPVGEILTRSKYNQNSKYINYRDLYIGEKFIIRRKSNSQSINDDIVRKEDYIYLDFFNLNQEWRVYTYKYFKKEEMKLFLAPIWDSDEFYNTIQIKEYDEQPTYSCQLLFKKDEESTDEIGLIGIHRFYESGWWFEEYKDYFCISKWYLKEVKRKPYNLKLGCNWQFIPKDEGWTE

SEQ ID NO: 53 - protein, 1304 aa, Artificial Sequence
  Synthetic polypeptide
MPFVNKQFNYKDPVNGVDIAYIKIPNAGQMQPVKAFKIHNKIWVIPERDTFTNPEEGDLNPPPEAKQVPVSYYDSTYLSTDNEKDNYLKGVTKLFERIYSTDLGRMLLTSIVRGIPFWGGSTIDTELKVIDTNCINVIQPDGSYRSEELNLVIIGPSADIIQFECKSFGHEVLNLTRNGYGSTQYIRFSPDFTFGFEESLEVDTNPLLGAGKFATDPAVTLAHELIHAGHRLYGIAINPNRVFKVNTNAYYEMSGLEVSFEELRTFGGHDAKFIDSLQENEFRLYYYNKFKDIASTLNKAKSIVGTTASLQYMKNVFKEKYLLSEDTSGKFSVDKLKFDKLYKMLTEIYTEDNFVKFFKVLNRKTYLNFDKAVFKINIVPKVNYTIYDGFNLRNTNLAANFNGQNTEINNMNFTKLKNFTGLFEFYKLLCVRGIITSKTKSLDKGYNKALNDLCIKVNNWDLFFSPSEDNFTNDLNKGEEITSDTNIEAAEENISLDLIQQYYLTFNFDNEPENISIENLSSDIIGQLELMPNIERFPNGKKYELDKYTMFHYLRAQEFEHGKSRIALTNSVNEALLNPSRVYTFFSSDYVKKVNKATEAAMFLGWVEQLVYDFTDETSEVSTTDKIADITIIIPYIGPALNIGNMLYKDDFVGALIFSGAVILLEFIPEIAIPVLGTFALVSYIANKVLTVQTIDNALSKRNEKWDEVYKYIVTNWLAKVNTQIDLIRKKMKEALENQAEATKAIINYQYNQYTEEEKNNINFNIDDLSSKLNESINKAMININKFLNQCSVSYLMNSMIPYGVKRLEDFDASLKDALLKYIYDNRGTLIGQVDRLKDKVNNTLSTDIPFQLSKYVDNQRLLSTFTEYIKNILNNIILNLRYKDNNLIDLSGYGAKVEVYDGVELNDKNQFKLTSSANSKIRVTQNQNIIFNSVFLDFSVSFWIRIPKYKNDGIQNYIHNEYTIINCMKNNSGWKISIRGNRIIWTLIDINGKTKSVFFEYNIREDISEYINRWFFVTITNNLNNAKIYINGKLESNTDIKDIREVIANGEIIFKLDGDIDRTQFIWMKYFSIFNTELSQSNIEERYKIQSYSEYLKDFWGNPLMYNKEYYMFNAGNKNSYIKLKKDSPVGEILTRSKYNQNSKYINYRDLYIGEKFIIRRKSNSQSINDDIVRKEDYIYLDFFNLNQEQRVYTYKYFKKEEMKLFLAPISDSDEFYNTIQIKEYDEQPTYSCQLLFKKDEESTDEIGLIGIHRFYESGWWFEEYKDYFCISKWYLKEVKRKPYNLKLGCNWQFIPKDEGWTE

SEQ ID NO: 54 - protein, 1304 aa, Artificial Sequence
  Synthetic polypeptide
MPFVNKQFNYKDPVNGVDIAYIKIPNAGQMQPVKAFKIHNKIWVIPERDTFTNPEEGDLNPPPEAKQVPVSYYDSTYLSTDNEKDNYLKGVTKLFERIYSTDLGRMLLTSIVRGIPFWGGSTIDTELKVIDTNCINVIQPDGSYRSEELNLVIIGPSADIIQFECKSFGHEVLNLTRNGYGSTQYIRFSPDFTFGFEESLEVDTNPLLGAGKFATDPAVTLAHELIHAGHRLYGIAINPNRVFKVNTNAYYEMSGLEVSFEELRTFGGHDAKFIDSLQENEFRLYYYNKFKDIASTLNKAKSIVGTTASLQYMKNVFKEKYLLSEDTSGKFSVDKLKFDKLYKMLTEIYTEDNFVKFFKVLNRKTYLNFDKAVFKINIVPKVNYTIYDGFNLRNTNLAANFNGQNTEINNMNFTKLKNFTGLFEFYKLLCVRGIITSKTKSLDKGYNKALNDLCIKVNNWDLFFSPSEDNFTNDLNKGEEITSDTNIEAAEENISLDLIQQYYLTFNFDNEPENISIENLSSDIIGQLELMPNIERFPNGKKYELDKYTMFHYLRAQEFEHGKSRIALTNSVNEALLNPSRVYTFFSSDYVKKVNKATEAAMFLGWVEQLVYDFTDETSEVSTTDKIADITIIIPYIGPALNIGNMLYKDDFVGALIFSGAVILLEFIPEIAIPVLGTFALVSYIANKVLTVQTIDNALSKRNEKWDEVYKYIVTNWLAKVNTQIDLIRKKMKEALENQAEATKAIINYQYNQYTEEEKNNINFNIDDLSSKLNESINKAMININKFLNQCSVSYLMNSMIPYGVKRLEDFDASLKDALLKYIYDNRGTLIGQVDRLKDKVNNTLSTDIPFQLSKYVDNQRLLSTFTEYIKNILNNIILNLRYKDNNLIDLSGYGAKVEVYDGVELNDKNQFKLTSSANSKIRVTQNQNIIFNSVFLDFSVSFWIRIPKYKNDGIQNYIHNEYTIINCMKNNSGWKISIRGNRIIWTLIDINGKTKSVFFEYNIREDISEYINRWFFVTITNNLNNAKIYINGKLESNTDIKDIREVIANGEIIFKLDGDIDRTQFIWMKYFSIFNTELSQSNIEERYKIQSYSEYLKDFWGNPLMYNKEYYMFNAGNKNSYIKLKKDSPVGEILTRSKYNQNSKYINYRDLYIGEKFIIRRKSNSQSINDDIVRKEDYIYLDFFNLNQEWRVYTYKYFKKEEVKLFLAPIYDSDEFYNTIQIKEYDEQPTYSCQLLFKKDEESTDEIGLIGIHRFYESGWWFEEYKDYFCISKWYLKEVKRKPYNLKLGCNWQFIPKDEGWTE

SEQ ID NO: 55 - protein, 1304 aa, Artificial Sequence
  Synthetic polypeptide
MPFVNKQFNYKDPVNGVDIAYIKIPNAGQMQPVKAFKIHNKIWVIPERDTFTNPEEGDLNPPPEAKQVPVSYYDSTYLSTDNEKDNYLKGVTKLFERIYSTDLGRMLLTSIVRGIPFWGGSTIDTELKVIDTNCINVIQPDGSYRSEELNLVIIGPSADIIQFECKSFGHEVLNLTRNGYGSTQYIRFSPDFTFGFEESLEVDTNPLLGAGKFATDPAVTLAHELIHAGHRLYGIAINPNRVFKVNTNAYYEMSGLEVSFEELRTFGGHDAKFIDSLQENEFRLYYYNKFKDIASTLNKAKSIVGTTASLQYMKNVFKEKYLLSEDTSGKFSVDKLKFDKLYKMLTEIYTEDNFVKFFKVLNRKTYLNFDKAVFKINIVPKVNYTIYDGFNLRNTNLAANFNGQNTEINNMNFTKLKNFTGLFEFYKLLCVRGIITSKTKSLDKGYNKALNDLCIKVNNWDLFFSPSEDNFTNDLNKGEEITSDTNIEAAEENISLDLIQQYYLTFNFDNEPENISIENLSSDIIGQLELMPNIERFPNGKKYELDKYTMFHYLRAQEFEHGKSRIALTNSVNEALLNPSRVYTFFSSDYVKKVNKATEAAMFLGWVEQLVYDFTDETSEVSTTDKIADITIIIPYIGPALNIGNMLYKDDFVGALIFSGAVILLEFIPEIAIPVLGTFALVSYIANKVLTVQTIDNALSKRNEKWDEVYKYIVTNWLAKVNTQIDLIRKKMKEALENQAEATKAIINYQYNQYTEEEKNNINFNIDDLSSKLNESINKAMININKFLNQCSVSYLMNSMIPYGVKRLEDFDASLKDALLKYIYDNRGTLIGQVDRLKDKVNNTLSTDIPFQLSKYVDNQRLLSTFTEYIKNILNNIILNLRYKDNNLIDLSGYGAKVEVYDGVELNDKNQFKLTSSANSKIRVTQNQNIIFNSVFLDFSVSFWIRIPKYKNDGIQNYIHNEYTIINCMKNNSGWKISIRGNRIIWTLIDINGKTKSVFFEYNIREDISEYINRWFFVTITNNLNNAKIYINGKLESNTDIKDIREVIANGEIIFKLDGDIDRTQFIWMKYFSIFNTELSQSNIEERYKIQSYSEYLKDFWGNPLMYNKEYYMFNAGNKNSYIKLKKDSPVGEILTRSKYNQNSKYINYRDLYIGEKFIIRRKSNSQSINDDIVRKEDYIYLDFFNLNQEWRVYTYKYFKKEEVKLFLAPIWDSDEFYNTIQIKEYDEQPTYSCQLLFKKDEESTDEIGLIGIHRFYESGWWFEEYKDYFCISKWYLKEVKRKPYNLKLGCNWQFIPKDEGWTE

SEQ ID NO: 56 - protein, 1304 aa, Artificial Sequence
  Synthetic polypeptide
MPFVNKQFNYKDPVNGVDIAYIKIPNAGQMQPVKAFKIHNKIWVIPERDTFTNPEEGDLNPPPEAKQVPVSYYDSTYLSTDNEKDNYLKGVTKLFERIYSTDLGRMLLTSIVRGIPFWGGSTIDTELKVIDTNCINVIQPDGSYRSEELNLVIIGPSADIIQFECKSFGHEVLNLTRNGYGSTQYIRFSPDFTFGFEESLEVDTNPLLGAGKFATDPAVTLAHELIHAGHRLYGIAINPNRVFKVNTNAYYEMSGLEVSFEELRTFGGHDAKFIDSLQENEFRLYYYNKFKDIASTLNKAKSIVGTTASLQYMKNVFKEKYLLSEDTSGKFSVDKLKFDKLYKMLTEIYTEDNFVKFFKVLNRKTYLNFDKAVFKINIVPKVNYTIYDGFNLRNTNLAANFNGQNTEINNMNFTKLKNFTGLFEFYKLLCVRGIITSKTKSLDKGYNKALNDLCIKVNNWDLFFSPSEDNFTNDLNKGEEITSDTNIEAAEENISLDLIQQYYLTFNFDNEPENISIENLSSDIIGQLELMPNIERFPNGKKYELDKYTMFHYLRAQEFEHGKSRIALTNSVNEALLNPSRVYTFFSSDYVKKVNKATEAAMFLGWVEQLVYDFTDETSEVSTTDKIADITIIIPYIGPALNIGNMLYKDDFVGALIFSGAVILLEFIPEIAIPVLGTFALVSYIANKVLTVQTIDNALSKRNEKWDEVYKYIVTNWLAKVNTQIDLIRKKMKEALENQAEATKAIINYQYNQYTEEEKNNINFNIDDLSSKLNESINKAMININKFLNQCSVSYLMNSMIPYGVKRLEDFDASLKDALLKYIYDNRGTLIGQVDRLKDKVNNTLSTDIPFQLSKYVDNQRLLSTFTEYIKNILNNIILNLRYKDNNLIDLSGYGAKVEVYDGVELNDKNQFKLTSSANSKIRVTQNQNIIFNSVFLDFSVSFWIRIPKYKNDGIQNYIHNEYTIINCMKNNSGWKISIRGNRIIWTLIDINGKTKSVFFEYNIREDISEYINRWFFVTITNNLNNAKIYINGKLESNTDIKDIREVIANGEIIFKLDGDIDRTQFIWMKYFSIFNTELSQSNIEERYKIQSYSEYLKDFWGNPLMYNKEYYMFNAGNKNSYIKLKKDSPVGEILTRSKYNQNSKYINYRDLYIGEKFIIRRKSNSQSINDDIVRKEDYIYLDFFNLNQEQRVYTYKYFKKEEVKLFLAPISDSDEFYNTIQIKEYDEQPTYSCQLLFKKDEESTDEIGLIGIHRFYESGWWFEEYKDYFCISKWYLKEVKRKPYNLKLGCNWQFIPKDEGWTE

SEQ ID NO: 57 - protein, 1304 aa, Artificial Sequence
  Synthetic polypeptide
MPFVNKQFNYKDPVNGVDIAYIKIPNAGQMQPVKAFKIHNKIWVIPERDTFTNPEEGDLNPPPEAKQVPVSYYDSTYLSTDNEKDNYLKGVTKLFERIYSTDLGRMLLTSIVRGIPFWGGSTIDTELKVIDTNCINVIQPDGSYRSEELNLVIIGPSADIIQFECKSFGHEVLNLTRNGYGSTQYIRFSPDFTFGFEESLEVDTNPLLGAGKFATDPAVTLAHELIHAGHRLYGIAINPNRVFKVNTNAYYEMSGLEVSFEELRTFGGHDAKFIDSLQENEFRLYYYNKFKDIASTLNKAKSIVGTTASLQYMKNVFKEKYLLSEDTSGKFSVDKLKFDKLYKMLTEIYTEDNFVKFFKVLNRKTYLNFDKAVFKINIVPKVNYTIYDGFNLRNTNLAANFNGQNTEINNMNFTKLKNFTGLFEFYKLLCVRGIITSKTKSLDKGYNKALNDLCIKVNNWDLFFSPSEDNFTNDLNKGEEITSDTNIEAAEENISLDLIQQYYLTFNFDNEPENISIENLSSDIIGQLELMPNIERFPNGKKYELDKYTMFHYLRAQEFEHGKSRIALTNSVNEALLNPSRVYTFFSSDYVKKVNKATEAAMFLGWVEQLVYDFTDETSEVSTTDKIADITIIIPYIGPALNIGNMLYKDDFVGALIFSGAVILLEFIPEIAIPVLGTFALVSYIANKVLTVQTIDNALSKRNEKWDEVYKYIVTNWLAKVNTQIDLIRKKMKEALENQAEATKAIINYQYNQYTEEEKNNINFNIDDLSSKLNESINKAMININKFLNQCSVSYLMNSMIPYGVKRLEDFDASLKDALLKYIYDNRGTLIGQVDRLKDKVNNTLSTDIPFQLSKYVDNQRLLSTFTEYIKNILNNIILNLRYKDNNLIDLSGYGAKVEVYDGVELNDKNQFKLTSSANSKIRVTQNQNIIFNSVFLDFSVSFWIRIPKYKNDGIQNYIHNEYTIINCMKNNSGWKISIRGNRIIWTLIDINGKTKSVFFEYNIREDISEYINRWFFVTITNNLNNAKIYINGKLESNTDIKDIREVIANGEIIFKLDGDIDRTQFIWMKYFSIFNTELSQSNIEERYKIQSYSEYLKDFWGNPLMYNKEYYMFNAGNKNSYIKLKKDSPVGEILTRSKYNQNSKYINYRDLYIGEKFIIRRKSNSQSINDDIVRKEDYIYLDFFNLNQEWRVYTYKYFKKEEQKLFLAPIYDSDEFYNTIQIKEYDEQPTYSCQLLFKKDEESTDEIGLIGIHRFYESGWWFEEYKDYFCISKWYLKEVKRKPYNLKLGCNWQFIPKDEGWTE

SEQ ID NO: 58 - protein, 1306 aa, Artificial Sequence
  Synthetic polypeptide
MKLEINKFNYNDPIDGINVITMRPPRHSDKINKGKGPFKAFQVIKNIWIVPERYNFTNNTNDLNIPSEPIMEADAIYNPNYLNTPSEKDEFLQGVIKVLERIKSKPEGEKLLELISSSIPLPLVSNGALTLSDNETIAYQENNNIVSNLQANLVIYGPGPDIANNATYGLYSTPISNGEGTLSEVSFSPFYLKPFDESYGNYRSLVNIVNKFVKREFAPDPASTLMHELVHVTHNLYGISNRNFYYNFDTGKIETSRQQNSLIFEELLTFGGIDSKAISSLIIKKIIETAKNNYTTLISERLNTVTVENDLLKYIKNKIPVQGRLGNFKLDTAEFEKKLNTILFVLNESNLAQRFSILVRKHYLKERPIDPIYVNILDDNSYSTLEGFNISSQGSNDFQGQLLESSYFEKIESNALRAFIKICPRNGLLYNAIYRNSKNYLNNIDLEDKKTTSKTNVSYPCSLLNGCIEVENKDLFLISNKDSLNDINLSEEKIKPETTVFFKDKLPPQDITLSNYDFTEANSIPSISQQNILERNEELYEPIRNSLFEIKTIYVDKLTTFHFLEAQNIDESIDSSKIRVELTDSVDEALSNPNKVYSPFKNMSNTINSIETGITSTYIFYQWLRSIVKDFSDETGKIDVIDKSSDTLAIVPYIGPLLNIGNDIRHGDFVGAIELAGITALLEYVPEFTIPILVGLEVIGGELAREQVEAIVNNALDKRDQKWAEVYNITKAQWWGTIHLQINTRLAHTYKALSRQANAIKMNMEFQLANYKGNIDDKAKIKNAISETEILLNKSVEQAMKNTEKFMIKLSNSYLTKEMIPKVQDNLKNFDLETKKTLDKFIKEKEDILGTNLSSSLRRKVSIRLNKNIAFDINDIPFSEFDDLINQYKNEIEDYEVLNLGAEDGKIKDLSGTTSDINIGSDIELADGRENKAIKIKGSENSTIKIAMNKYLRFSATDNFSISFWIKHPKPTNLLNNGIEYTLVENFNQRGWKISIQDSKLIWYLRDHNNSIKIVTPDYIAFNGWNLITITNNRSKGSIVYVNGSKIEEKDISSIWNTEVDDPIIFRLKNNRDTQAFTLLDQFSIYRKELNQNEVVKLYNYYFNSNYIRDIWGNPLQYNKKYYLQTQDKPGKGLIREYWSSFGYDYVILSDSKTITFPNNIRYGALYNGSKVLIKNSKKLDGLVRNKDFIQLEIDGYNMGISADRFNEDTNYIGTTYGTTHDLTTDFEIIQRQEKYRNYCQLKTPYNIFHKSGLMSTETSKPTFHDYRDWVYSSAWYFQNYENLNLRKHTKTNWYFIPKDEGWDED

SEQ ID NO: 59 - protein, 892 aa, Artificial Sequence
  Synthetic polypeptide
MKLEINKFNYNDPIDGINVITMRPPRHSDKINKGKGPFKAFQVIKNIWIVPERYNFTNNTNDLNIPSEPIMEADAIYNPNYLNTPSEKDEFLQGVIKVLERIKSKPEGEKLLELISSSIPLPLVSNGALTLSDNETIAYQENNNIVSNLQANLVIYGPGPDIANNATYGLYSTPISNGEGTLSEVSFSPFYLKPFDESYGNYRSLVNIVNKFVKREFAPDPASTLMHELVHVTHNLYGISNRNFYYNFDTGKIETSRQQNSLIFEELLTFGGIDSKAISSLIIKKIIETAKNNYTTLISERLNTVTVENDLLKYIKNKIPVQGRLGNFKLDTAEFEKKLNTILFVLNESNLAQRFSILVRKHYLKERPIDPIYVNILDDNSYSTLEGFNISSQGSNDFQGQLLESSYFEKIESNALRAFIKICPRNGLLYNAIYRNSKNYLNNIDLEDKKTTSKTNVSYPCSLLNGCIEVENKDLFLISNKDSLNDINLSEEKIKPETTVFFKDKLPPQDITLSNYDFTEANSIPSISQQNILERNEELYEPIRNSLFEIKTIYVDKLTTFHFLEAQNIDESIDSSKIRVELTDSVDEALSNPNKVYSPFKNMSNTINSIETGITSTYIFYQWLRSIVKDFSDETGKIDVIDKSSDTLAIVPYIGPLLNIGNDIRHGDFVGAIELAGITALLEYVPEFTIPILVGLEVIGGELAREQVEAIVNNALDKRDQKWAEVYNITKAQWWGTIHLQINTRLAHTYKALSRQANAIKMNMEFQLANYKGNIDDKAKIKNAISETEILLNKSVEQAMKNTEKFMIKLSNSYLTKEMIPKVQDNLKNFDLETKKTLDKFIKEKEDILGTNLSSSLRRKVSIRLNKNIAFDINDIPFSEFDDLINQYKNEI

SEQ ID NO: 60 - protein, 439 aa, Artificial Sequence
  Synthetic polypeptide
MKLEINKFNYNDPIDGINVITMRPPRHSDKINKGKGPFKAFQVIKNIWIVPERYNFTNNTNDLNIPSEPIMEADAIYNPNYLNTPSEKDEFLQGVIKVLERIKSKPEGEKLLELISSSIPLPLVSNGALTLSDNETIAYQENNNIVSNLQANLVIYGPGPDIANNATYGLYSTPISNGEGTLSEVSFSPFYLKPFDESYGNYRSLVNIVNKFVKREFAPDPASTLMHELVHVTHNLYGISNRNFYYNFDTGKIETSRQQNSLIFEELLTFGGIDSKAISSLIIKKIIETAKNNYTTLISERLNTVTVENDLLKYIKNKIPVQGRLGNFKLDTAEFEKKLNTILFVLNESNLAQRFSILVRKHYLKERPIDPIYVNILDDNSYSTLEGFNISSQGSNDFQGQLLESSYFEKIESNALRAFIKICPRNGLLYNAIYRNSKN

SEQ ID NO: 61 - protein, 1306 aa, Artificial Sequence
  Synthetic polypeptide
MKLEINKFNYNDPIDGINVITMRPPRHSDKINKGKGPFKAFQVIKNIWIVPERYNFTNNTNDLNIPSEPIMEADAIYNPNYLNTPSEKDEFLQGVIKVLERIKSKPEGEKLLELISSSIPLPLVSNGALTLSDNETIAYQENNNIVSNLQANLVIYGPGPDIANNATYGLYSTPISNGEGTLSEVSFSPFYLKPFDESYGNYRSLVNIVNKFVKREFAPDPASTLMHELVHVTHNLYGISNRNFYYNFDTGKIETSRQQNSLIFEELLTFGGIDSKAISSLIIKKIIETAKNNYTTLISERLNTVTVENDLLKYIKNKIPVQGRLGNFKLDTAEFEKKLNTILFVLNESNLAQRFSILVRKHYLKERPIDPIYVNILDDNSYSTLEGFNISSQGSNDFQGQLLESSYFEKIESNALRAFIKICPRNGLLYNAIYRNSKNYLNNIDLEDKKTTSKTNVSYPSSLLNGCIEVENKDLFLISNKDSLNDINLSEEKIKPETTVFFKDKLPPQDITLSNYDFTEANSIPSISQQNILERNEELYEPIRNSLFEIKTIYVDKLTTFHFLEAQNIDESIDSSKIRVELTDSVDEALSNPNKVYSPFKNMSNTINSIETGITSTYIFYQWLRSIVKDFSDETGKIDVIDKSSDTLAIVPYIGPLLNIGNDIRHGDFVGAIELAGITALLEYVPEFTIPILVGLEVIGGELAREQVEAIVNNALDKRDQKWAEVYNITKAQWWGTIHLQINTRLAHTYKALSRQANAIKMNMEFQLANYKGNIDDKAKIKNAISETEILLNKSVEQAMKNTEKFMIKLSNSYLTKEMIPKVQDNLKNFDLETKKTLDKFIKEKEDILGTNLSSSLRRKVSIRLNKNIAFDINDIPFSEFDDLINQYKNEIEDYEVLNLGAEDGKIKDLSGTTSDINIGSDIELADGRENKAIKIKGSENSTIKIAMNKYLRFSATDNFSISFWIKHPKPTNLLNNGIEYTLVENFNQRGWKISIQDSKLIWYLRDHNNSIKIVTPDYIAFNGWNLITITNNRSKGSIVYVNGSKIEEKDISSIWNTEVDDPIIFRLKNNRDTQAFTLLDQFSIYRKELNQNEVVKLYNYYFNSNYIRDIWGNPLQYNKKYYLQTQDKPGKGLIREYWSSFGYDYVILSDSKTITFPNNIRYGALYNGSKVLIKNSKKLDGLVRNKDFIQLEIDGYNMGISADRFNEDTNYIGTTYGTTHDLTTDFEIIQRQEKYRNYCQLKTPYNIFHKSGLMSTETSKPTFHDYRDWVYSSAWYFQNYENLNLRKHTKTNWYFIPKDEGWDED

SEQ ID NO: 62 - protein, 1306 aa, Artificial Sequence
  Synthetic polypeptide
MKLEINKFNYNDPIDGINVITMRPPRHSDKINKGKGPFKAFQVIKNIWIVPERYNFTNNTNDLNIPSEPIMEADAIYNPNYLNTPSEKDEFLQGVIKVLERIKSKPEGEKLLELISSSIPLPLVSNGALTLSDNETIAYQENNNIVSNLQANLVIYGPGPDIANNATYGLYSTPISNGEGTLSEVSFSPFYLKPFDESYGNYRSLVNIVNKFVKREFAPDPASTLMHELVHVTHNLYGISNRNFYYNFDTGKIETSRQQNSLIFEELLTFGGIDSKAISSLIIKKIIETAKNNYTTLISERLNTVTVENDLLKYIKNKIPVQGRLGNFKLDTAEFEKKLNTILFVLNESNLAQRFSILVRKHYLKERPIDPIYVNILDDNSYSTLEGFNISSQGSNDFQGQLLESSYFEKIESNALRAFIKICPRNGLLYNAIYRNSKNYLNNIDLEDKKTTSKTNVSYPASLLNGCIEVENKDLFLISNKDSLNDINLSEEKIKPETTVFFKDKLPPQDITLSNYDFTEANSIPSISQQNILERNEELYEPIRNSLFEIKTIYVDKLTTFHFLEAQNIDESIDSSKIRVELTDSVDEALSNPNKVYSPFKNMSNTINSIETGITSTYIFYQWLRSIVKDFSDETGKIDVIDKSSDTLAIVPYIGPLLNIGNDIRHGDFVGAIELAGITALLEYVPEFTIPILVGLEVIGGELAREQVEAIVNNALDKRDQKWAEVYNITKAQWWGTIHLQINTRLAHTYKALSRQANAIKMNMEFQLANYKGNIDDKAKIKNAISETEILLNKSVEQAMKNTEKFMIKLSNSYLTKEMIPKVQDNLKNFDLETKKTLDKFIKEKEDILGTNLSSSLRRKVSIRLNKNIAFDINDIPFSEFDDLINQYKNEIEDYEVLNLGAEDGKIKDLSGTTSDINIGSDIELADGRENKAIKIKGSENSTIKIAMNKYLRFSATDNFSISFWIKHPKPTNLLNNGIEYTLVENFNQRGWKISIQDSKLIWYLRDHNNSIKIVTPDYIAFNGWNLITITNNRSKGSIVYVNGSKIEEKDISSIWNTEVDDPIIFRLKNNRDTQAFTLLDQFSIYRKELNQNEVVKLYNYYFNSNYIRDIWGNPLQYNKKYYLQTQDKPGKGLIREYWSSFGYDYVILSDSKTITFPNNIRYGALYNGSKVLIKNSKKLDGLVRNKDFIQLEIDGYNMGISADRFNEDTNYIGTTYGTTHDLTTDFEIIQRQEKYRNYCQLKTPYNIFHKSGLMSTETSKPTFHDYRDWVYSSAWYFQNYENLNLRKHTKTNWYFIPKDEGWDED

SEQ ID NO: 63 - protein, 1306 aa, Artificial Sequence
  Synthetic polypeptide
MKLEINKFNYNDPIDGINVITMRPPRHSDKINKGKGPFKAFQVIKNIWIVPERYNFTNNTNDLNIPSEPIMEADAIYNPNYLNTPSEKDEFLQGVIKVLERIKSKPEGEKLLELISSSIPLPLVSNGALTLSDNETIAYQENNNIVSNLQANLVIYGPGPDIANNATYGLYSTPISNGEGTLSEVSFSPFYLKPFDESYGNYRSLVNIVNKFVKREFAPDPASTLMHELVHVTHNLYGISNRNFYYNFDTGKIETSRQQNSLIFEELLTFGGIDSKAISSLIIKKIIETAKNNYTTLISERLNTVTVENDLLKYIKNKIPVQGRLGNFKLDTAEFEKKLNTILFVLNESNLAQRFSILVRKHYLKERPIDPIYVNILDDNSYSTLEGFNISSQGSNDFQGQLLESSYFEKIESNALRAFIKICPRNGLLYNAIYRNSKNYLNNIDLEDKKTTSKTNVSYPCSLLNGSIEVENKDLFLISNKDSLNDINLSEEKIKPETTVFFKDKLPPQDITLSNYDFTEANSIPSISQQNILERNEELYEPIRNSLFEIKTIYVDKLTTFHFLEAQNIDESIDSSKIRVELTDSVDEALSNPNKVYSPFKNMSNTINSIETGITSTYIFYQWLRSIVKDFSDETGKIDVIDKSSDTLAIVPYIGPLLNIGNDIRHGDFVGAIELAGITALLEYVPEFTIPILVGLEVIGGELAREQVEAIVNNALDKRDQKWAEVYNITKAQWWGTIHLQINTRLAHTYKALSRQANAIKMNMEFQLANYKGNIDDKAKIKNAISETEILLNKSVEQAMKNTEKFMIKLSNSYLTKEMIPKVQDNLKNFDLETKKTLDKFIKEKEDILGTNLSSSLRRKVSIRLNKNIAFDINDIPFSEFDDLINQYKNEIEDYEVLNLGAEDGKIKDLSGTTSDINIGSDIELADGRENKAIKIKGSENSTIKIAMNKYLRFSATDNFSISFWIKHPKPTNLLNNGIEYTLVENFNQRGWKISIQDSKLIWYLRDHNNSIKIVTPDYIAFNGWNLITITNNRSKGSIVYVNGSKIEEKDISSIWNTEVDDPIIFRLKNNRDTQAFTLLDQFSIYRKELNQNEVVKLYNYYFNSNYIRDIWGNPLQYNKKYYLQTQDKPGKGLIREYWSSFGYDYVILSDSKTITFPNNIRYGALYNGSKVLIKNSKKLDGLVRNKDFIQLEIDGYNMGISADRFNEDTNYIGTTYGTTHDLTTDFEIIQRQEKYRNYCQLKTPYNIFHKSGLMSTETSKPTFHDYRDWVYSSAWYFQNYENLNLRKHTKTNWYFIPKDEGWDED

SEQ ID NO: 64 - protein, 1306 aa, Artificial Sequence
  Synthetic polypeptide
MKLEINKFNYNDPIDGINVITMRPPRHSDKINKGKGPFKAFQVIKNIWIVPERYNFTNNTNDLNIPSEPIMEADAIYNPNYLNTPSEKDEFLQGVIKVLERIKSKPEGEKLLELISSSIPLPLVSNGALTLSDNETIAYQENNNIVSNLQANLVIYGPGPDIANNATYGLYSTPISNGEGTLSEVSFSPFYLKPFDESYGNYRSLVNIVNKFVKREFAPDPASTLMHELVHVTHNLYGISNRNFYYNFDTGKIETSRQQNSLIFEELLTFGGIDSKAISSLIIKKIIETAKNNYTTLISERLNTVTVENDLLKYIKNKIPVQGRLGNFKLDTAEFEKKLNTILFVLNESNLAQRFSILVRKHYLKERPIDPIYVNILDDNSYSTLEGFNISSQGSNDFQGQLLESSYFEKIESNALRAFIKICPRNGLLYNAIYRNSKNYLNNIDLEDKKTTSKTNVSYPCSLLNGAIEVENKDLFLISNKDSLNDINLSEEKIKPETTVFFKDKLPPQDITLSNYDFTEANSIPSISQQNILERNEELYEPIRNSLFEIKTIYVDKLTTFHFLEAQNIDESIDSSKIRVELTDSVDEALSNPNKVYSPFKNMSNTINSIETGITSTYIFYQWLRSIVKDFSDETGKIDVIDKSSDTLAIVPYIGPLLNIGNDIRHGDFVGAIELAGITALLEYVPEFTIPILVGLEVIGGELAREQVEAIVNNALDKRDQKWAEVYNITKAQWWGTIHLQINTRLAHTYKALSRQANAIKMNMEFQLANYKGNIDDKAKIKNAISETEILLNKSVEQAMKNTEKFMIKLSNSYLTKEMIPKVQDNLKNFDLETKKTLDKFIKEKEDILGTNLSSSLRRKVSIRLNKNIAFDINDIPFSEFDDLINQYKNEIEDYEVLNLGAEDGKIKDLSGTTSDINIGSDIELADGRENKAIKIKGSENSTIKIAMNKYLRFSATDNFSISFWIKHPKPTNLLNNGIEYTLVENFNQRGWKISIQDSKLIWYLRDHNNSIKIVTPDYIAFNGWNLITITNNRSKGSIVYVNGSKIEEKDISSIWNTEVDDPIIFRLKNNRDTQAFTLLDQFSIYRKELNQNEVVKLYNYYFNSNYIRDIWGNPLQYNKKYYLQTQDKPGKGLIREYWSSFGYDYVILSDSKTITFPNNIRYGALYNGSKVLIKNSKKLDGLVRNKDFIQLEIDGYNMGISADRFNEDTNYIGTTYGTTHDLTTDFEIIQRQEKYRNYCQLKTPYNIFHKSGLMSTETSKPTFHDYRDWVYSSAWYFQNYENLNLRKHTKTNWYFIPKDEGWDED

SEQ ID NO: 65 - protein, 1306 aa, Artificial Sequence
  Synthetic polypeptide
MKLEINKFNYNDPIDGINVITMRPPRHSDKINKGKGPFKAFQVIKNIWIVPERYNFTNNTNDLNIPSEPIMEADAIYNPNYLNTPSEKDEFLQGVIKVLERIKSKPEGEKLLELISSSIPLPLVSNGALTLSDNETIAYQENNNIVSNLQANLVIYGPGPDIANNATYGLYSTPISNGEGTLSEVSFSPFYLKPFDESYGNYRSLVNIVNKFVKREFAPDPASTLMHELVHVTHNLYGISNRNFYYNFDTGKIETSRQQNSLIFEELLTFGGIDSKAISSLIIKKIIETAKNNYTTLISERLNTVTVENDLLKYIKNKIPVQGRLGNFKLDTAEFEKKLNTILFVLNESNLAQRFSILVRKHYLKERPIDPIYVNILDDNSYSTLEGFNISSQGSNDFQGQLLESSYFEKIESNALRAFIKICPRNGLLYNAIYRNSKNYLNNIDLEDKKTTSKTNVSYPCSLLNGCIEVENKDLFLISNKDSLNDINLSEEKIKPETTVFFKDKLPPQDITLSNYDFTEANSIPSISQQNILERNEELYEPIRNSLFEIKTIYVDKLTTFHFLEAQNIDESIDSSKIRVELTDSVDEALSNPNKVYSPFKNMSNTINSIETGITSTYIFYQWLRSIVKDFSDETGKIDVIDKSSDTLAIVPYIGPLLNIGNDIRHGDFVGAIELAGITALLEYVPEFTIPILVGLEVIGGELAREQVEAIVNNALDKRDQKWAEVYNITKAQWWGTIHLQINTRLAHTYKALSRQANAIKMNMEFQLANYKGNIDDKAKIKNAISETEILLNKSVEQAMKNTEKFMIKLSNSYLTKEMIPKVQDNLKNFDLETKKTLDKFIKEKEDILGTNLSSSLRRKVSIRLNKNIAFDINDIPFSEFDDLINQYKNEIEDYEVLNLGAEDGKIKDLSGTTSDINIGSDIELADGRENKAIKIKGSENSTIKIAMNKYLRFSATDNFSISFWIKHPKPTNLLNNGIEYTLVENFNQRGWKISIQDSKLIWYLRDHNNSIKIVTPDYIAFNGWNLITITNNRSKGSIVYVNGSKIEEKDISSIWNTEVDDPIIFRLKNNRDTQAFTLLDQFSIYRKELNQNEVVKLYNYYFNSNYIRDIWGNPLQYNKKYYLQTQDKPGKGLIREYWSSFGYDYVILSDSKTITFPNNIRYGALYNGSKVLIKNSKKLDGLVRNKDFIQLEIDGYNMGISADRFNEDTNYIGTTYGTTHDLTTDFEIIQRQEKYRNYSQLKTPYNIFHKSGLMSTETSKPTFHDYRDWVYSSAWYFQNYENLNLRKHTKTNWYFIPKDEGWDED

SEQ ID NO: 66 - protein, 1306 aa, Artificial Sequence
  Synthetic polypeptide
MKLEINKFNYNDPIDGINVITMRPPRHSDKINKGKGPFKAFQVIKNIWIVPERYNFTNNTNDLNIPSEPIMEADAIYNPNYLNTPSEKDEFLQGVIKVLERIKSKPEGEKLLELISSSIPLPLVSNGALTLSDNETIAYQENNNIVSNLQANLVIYGPGPDIANNATYGLYSTPISNGEGTLSEVSFSPFYLKPFDESYGNYRSLVNIVNKFVKREFAPDPASTLMHELVHVTHNLYGISNRNFYYNFDTGKIETSRQQNSLIFEELLTFGGIDSKAISSLIIKKIIETAKNNYTTLISERLNTVTVENDLLKYIKNKIPVQGRLGNFKLDTAEFEKKLNTILFVLNESNLAQRFSILVRKHYLKERPIDPIYVNILDDNSYSTLEGFNISSQGSNDFQGQLLESSYFEKIESNALRAFIKICPRNGLLYNAIYRNSKNYLNNIDLEDKKTTSKTNVSYPCSLLNGCIEVENKDLFLISNKDSLNDINLSEEKIKPETTVFFKDKLPPQDITLSNYDFTEANSIPSISQQNILERNEELYEPIRNSLFEIKTIYVDKLTTFHFLEAQNIDESIDSSKIRVELTDSVDEALSNPNKVYSPFKNMSNTINSIETGITSTYIFYQWLRSIVKDFSDETGKIDVIDKSSDTLAIVPYIGPLLNIGNDIRHGDFVGAIELAGITALLEYVPEFTIPILVGLEVIGGELAREQVEAIVNNALDKRDQKWAEVYNITKAQWWGTIHLQINTRLAHTYKALSRQANAIKMNMEFQLANYKGNIDDKAKIKNAISETEILLNKSVEQAMKNTEKFMIKLSNSYLTKEMIPKVQDNLKNFDLETKKTLDKFIKEKEDILGTNLSSSLRRKVSIRLNKNIAFDINDIPFSEFDDLINQYKNEIEDYEVLNLGAEDGKIKDLSGTTSDINIGSDIELADGRENKAIKIKGSENSTIKIAMNKYLRFSATDNFSISFWIKHPKPTNLLNNGIEYTLVENFNQRGWKISIQDSKLIWYLRDHNNSIKIVTPDYIAFNGWNLITITNNRSKGSIVYVNGSKIEEKDISSIWNTEVDDPIIFRLKNNRDTQAFTLLDQFSIYRKELNQNEVVKLYNYYFNSNYIRDIWGNPLQYNKKYYLQTQDKPGKGLIREYWSSFGYDYVILSDSKTITFPNNIRYGALYNGSKVLIKNSKKLDGLVRNKDFIQLEIDGYNMGISADRFNEDTNYIGTTYGTTHDLTTDFEIIQRQEKYRNYAQLKTPYNIFHKSGLMSTETSKPTFHDYRDWVYSSAWYFQNYENLNLRKHTKTNWYFIPKDEGWDED

SEQ ID NO: 67 - protein, 1306 aa, Artificial Sequence
  Synthetic polypeptide
MKLEINKFNYNDPIDGINVITMRPPRHSDKINKGKGPFKAFQVIKNIWIVPERYNFTNNTNDLNIPSEPIMEADAIYNPNYLNTPSEKDEFLQGVIKVLERIKSKPEGEKLLELISSSIPLPLVSNGALTLSDNETIAYQENNNIVSNLQANLVIYGPGPDIANNATYGLYSTPISNGEGTLSEVSFSPFYLKPFDESYGNYRSLVNIVNKFVKREFAPDPASTLMHELVHVTHNLYGISNRNFYYNFDTGKIETSRQQNSLIFEELLTFGGIDSKAISSLIIKKIIETAKNNYTTLISERLNTVTVENDLLKYIKNKIPVQGRLGNFKLDTAEFEKKLNTILFVLNESNLAQRFSILVRKHYLKERPIDPIYVNILDDNSYSTLEGFNISSQGSNDFQGQLLESSYFEKIESNALRAFIKICPRNGLLYNAIYRNSKNYLNNIDLEDKKTTSKTNVSYPSSLLNGCIEVENKDLFLISNKDSLNDINLSEEKIKPETTVFFKDKLPPQDITLSNYDFTEANSIPSISQQNILERNEELYEPIRNSLFEIKTIYVDKLTTFHFLEAQNIDESIDSSKIRVELTDSVDEALSNPNKVYSPFKNMSNTINSIETGITSTYIFYQWLRSIVKDFSDETGKIDVIDKSSDTLAIVPYIGPLLNIGNDIRHGDFVGAIELAGITALLEYVPEFTIPILVGLEVIGGELAREQVEAIVNNALDKRDQKWAEVYNITKAQWWGTIHLQINTRLAHTYKALSRQANAIKMNMEFQLANYKGNIDDKAKIKNAISETEILLNKSVEQAMKNTEKFMIKLSNSYLTKEMIPKVQDNLKNFDLETKKTLDKFIKEKEDILGTNLSSSLRRKVSIRLNKNIAFDINDIPFSEFDDLINQYKNEIEDYEVLNLGAEDGKIKDLSGTTSDINIGSDIELADGRENKAIKIKGSENSTIKIAMNKYLRFSATDNFSISFWIKHPKPTNLLNNGIEYTLVENFNQRGWKISIQDSKLIWYLRDHNNSIKIVTPDYIAFNGWNLITITNNRSKGSIVYVNGSKIEEKDISSIWNTEVDDPIIFRLKNNRDTQAFTLLDQFSIYRKELNQNEVVKLYNYYFNSNYIRDIWGNPLQYNKKYYLQTQDKPGKGLIREYWSSFGYDYVILSDSKTITFPNNIRYGALYNGSKVLIKNSKKLDGLVRNKDFIQLEIDGYNMGISADRFNEDTNYIGTTYGTTHDLTTDFEIIQRQEKYRNYAQLKTPYNIFHKSGLMSTETSKPTFHDYRDWVYSSAWYFQNYENLNLRKHTKTNWYFIPKDEGWDED

SEQ ID NO: 68 - protein, 1306 aa, Artificial Sequence
  Synthetic polypeptide
MKLEINKFNYNDPIDGINVITMRPPRHSDKINKGKGPFKAFQVIKNIWIVPERYNFTNNTNDLNIPSEPIMEADAIYNPNYLNTPSEKDEFLQGVIKVLERIKSKPEGEKLLELISSSIPLPLVSNGALTLSDNETIAYQENNNIVSNLQANLVIYGPGPDIANNATYGLYSTPISNGEGTLSEVSFSPFYLKPFDESYGNYRSLVNIVNKFVKREFAPDPASTLMHELVHVTHNLYGISNRNFYYNFDTGKIETSRQQNSLIFEELLTFGGIDSKAISSLIIKKIIETAKNNYTTLISERLNTVTVENDLLKYIKNKIPVQGRLGNFKLDTAEFEKKLNTILFVLNESNLAQRFSILVRKHYLKERPIDPIYVNILDDNSYSTLEGFNISSQGSNDFQGQLLESSYFEKIESNALRAFIKICPRNGLLYNAIYRNSKNYLNNIDLEDKKTTSKTNVSYPSSLLNGCIEVENKDLFLISNKDSLNDINLSEEKIKPETTVFFKDKLPPQDITLSNYDFTEANSIPSISQQNILERNEELYEPIRNSLFEIKTIYVDKLTTFHFLEAQNIDESIDSSKIRVELTDSVDEALSNPNKVYSPFKNMSNTINSIETGITSTYIFYQWLRSIVKDFSDETGKIDVIDKSSDTLAIVPYIGPLLNIGNDIRHGDFVGAIELAGITALLEYVPEFTIPILVGLEVIGGELAREQVEAIVNNALDKRDQKWAEVYNITKAQWWGTIHLQINTRLAHTYKALSRQANAIKMNMEFQLANYKGNIDDKAKIKNAISETEILLNKSVEQAMKNTEKFMIKLSNSYLTKEMIPKVQDNLKNFDLETKKTLDKFIKEKEDILGTNLSSSLRRKVSIRLNKNIAFDINDIPFSEFDDLINQYKNEIEDYEVLNLGAEDGKIKDLSGTTSDINIGSDIELADGRENKAIKIKGSENSTIKIAMNKYLRFSATDNFSISFWIKHPKPTNLLNNGIEYTLVENFNQRGWKISIQDSKLIWYLRDHNNSIKIVTPDYIAFNGWNLITITNNRSKGSIVYVNGSKIEEKDISSIWNTEVDDPIIFRLKNNRDTQAFTLLDQFSIYRKELNQNEVVKLYNYYFNSNYIRDIWGNPLQYNKKYYLQTQDKPGKGLIREYWSSFGYDYVILSDSKTITFPNNIRYGALYNGSKVLIKNSKKLDGLVRNKDFIQLEIDGYNMGISADRFNEDTNYIGTTYGTTHDLTTDFEIIQRQEKYRNYSQLKTPYNIFHKSGLMSTETSKPTFHDYRDWVYSSAWYFQNYENLNLRKHTKTNWYFIPKDEGWDED

SEQ ID NO: 69 - protein, 1306 aa, Artificial Sequence
  Synthetic polypeptide
MKLEINKFNYNDPIDGINVITMRPPRHSDKINKGKGPFKAFQVIKNIWIVPERYNFTNNTNDLNIPSEPIMEADAIYNPNYLNTPSEKDEFLQGVIKVLERIKSKPEGEKLLELISSSIPLPLVSNGALTLSDNETIAYQENNNIVSNLQANLVIYGPGPDIANNATYGLYSTPISNGEGTLSEVSFSPFYLKPFDESYGNYRSLVNIVNKFVKREFAPDPASTLMHELVHVTHNLYGISNRNFYYNFDTGKIETSRQQNSLIFEELLTFGGIDSKAISSLIIKKIIETAKNNYTTLISERLNTVTVENDLLKYIKNKIPVQGRLGNFKLDTAEFEKKLNTILFVLNESNLAQRFSILVRKHYLKERPIDPIYVNILDDNSYSTLEGFNISSQGSNDFQGQLLESSYFEKIESNALRAFIKICPRNGLLYNAIYRNSKNYLNNIDLEDKKTTSKTNVSYPASLLNGCIEVENKDLFLISNKDSLNDINLSEEKIKPETTVFFKDKLPPQDITLSNYDFTEANSIPSISQQNILERNEELYEPIRNSLFEIKTIYVDKLTTFHFLEAQNIDESIDSSKIRVELTDSVDEALSNPNKVYSPFKNMSNTINSIETGITSTYIFYQWLRSIVKDFSDETGKIDVIDKSSDTLAIVPYIGPLLNIGNDIRHGDFVGAIELAGITALLEYVPEFTIPILVGLEVIGGELAREQVEAIVNNALDKRDQKWAEVYNITKAQWWGTIHLQINTRLAHTYKALSRQANAIKMNMEFQLANYKGNIDDKAKIKNAISETEILLNKSVEQAMKNTEKFMIKLSNSYLTKEMIPKVQDNLKNFDLETKKTLDKFIKEKEDILGTNLSSSLRRKVSIRLNKNIAFDINDIPFSEFDDLINQYKNEIEDYEVLNLGAEDGKIKDLSGTTSDINIGSDIELADGRENKAIKIKGSENSTIKIAMNKYLRFSATDNFSISFWIKHPKPTNLLNNGIEYTLVENFNQRGWKISIQDSKLIWYLRDHNNSIKIVTPDYIAFNGWNLITITNNRSKGSIVYVNGSKIEEKDISSIWNTEVDDPIIFRLKNNRDTQAFTLLDQFSIYRKELNQNEVVKLYNYYFNSNYIRDIWGNPLQYNKKYYLQTQDKPGKGLIREYWSSFGYDYVILSDSKTITFPNNIRYGALYNGSKVLIKNSKKLDGLVRNKDFIQLEIDGYNMGISADRFNEDTNYIGTTYGTTHDLTTDFEIIQRQEKYRNYSQLKTPYNIFHKSGLMSTETSKPTFHDYRDWVYSSAWYFQNYENLNLRKHTKTNWYFIPKDEGWDED

SEQ ID NO: 70 - protein, 1306 aa, Artificial Sequence
  Synthetic polypeptide
MKLEINKFNYNDPIDGINVITMRPPRHSDKINKGKGPFKAFQVIKNIWIVPERYNFTNNTNDLNIPSEPIMEADAIYNPNYLNTPSEKDEFLQGVIKVLERIKSKPEGEKLLELISSSIPLPLVSNGALTLSDNETIAYQENNNIVSNLQANLVIYGPGPDIANNATYGLYSTPISNGEGTLSEVSFSPFYLKPFDESYGNYRSLVNIVNKFVKREFAPDPASTLMHELVHVTHNLYGISNRNFYYNFDTGKIETSRQQNSLIFEELLTFGGIDSKAISSLIIKKIIETAKNNYTTLISERLNTVTVENDLLKYIKNKIPVQGRLGNFKLDTAEFEKKLNTILFVLNESNLAQRFSILVRKHYLKERPIDPIYVNILDDNSYSTLEGFNISSQGSNDFQGQLLESSYFEKIESNALRAFIKICPRNGLLYNAIYRNSKNYLNNIDLEDKKTTSKTNVSYPASLLNGCIEVENKDLFLISNKDSLNDINLSEEKIKPETTVFFKDKLPPQDITLSNYDFTEANSIPSISQQNILERNEELYEPIRNSLFEIKTIYVDKLTTFHFLEAQNIDESIDSSKIRVELTDSVDEALSNPNKVYSPFKNMSNTINSIETGITSTYIFYQWLRSIVKDFSDETGKIDVIDKSSDTLAIVPYIGPLLNIGNDIRHGDFVGAIELAGITALLEYVPEFTIPILVGLEVIGGELAREQVEAIVNNALDKRDQKWAEVYNITKAQWWGTIHLQINTRLAHTYKALSRQANAIKMNMEFQLANYKGNIDDKAKIKNAISETEILLNKSVEQAMKNTEKFMIKLSNSYLTKEMIPKVQDNLKNFDLETKKTLDKFIKEKEDILGTNLSSSLRRKVSIRLNKNIAFDINDIPFSEFDDLINQYKNEIEDYEVLNLGAEDGKIKDLSGTTSDINIGSDIELADGRENKAIKIKGSENSTIKIAMNKYLRFSATDNFSISFWIKHPKPTNLLNNGIEYTLVENFNQRGWKISIQDSKLIWYLRDHNNSIKIVTPDYIAFNGWNLITITNNRSKGSIVYVNGSKIEEKDISSIWNTEVDDPIIFRLKNNRDTQAFTLLDQFSIYRKELNQNEVVKLYNYYFNSNYIRDIWGNPLQYNKKYYLQTQDKPGKGLIREYWSSFGYDYVILSDSKTITFPNNIRYGALYNGSKVLIKNSKKLDGLVRNKDFIQLEIDGYNMGISADRFNEDTNYIGTTYGTTHDLTTDFEIIQRQEKYRNYAQLKTPYNIFHKSGLMSTETSKPTFHDYRDWVYSSAWYFQNYENLNLRKHTKTNWYFIPKDEGWDED

SEQ ID NO: 71 - protein, 1306 aa, Artificial Sequence
  Synthetic polypeptide
MKLEINKFNYNDPIDGINVITMRPPRHSDKINKGKGPFKAFQVIKNIWIVPERYNFTNNTNDLNIPSEPIMEADAIYNPNYLNTPSEKDEFLQGVIKVLERIKSKPEGEKLLELISSSIPLPLVSNGALTLSDNETIAYQENNNIVSNLQANLVIYGPGPDIANNATYGLYSTPISNGEGTLSEVSFSPFYLKPFDESYGNYRSLVNIVNKFVKREFAPDPASTLMHELVHVTHNLYGISNRNFYYNFDTGKIETSRQQNSLIFEELLTFGGIDSKAISSLIIKKIIETAKNNYTTLISERLNTVTVENDLLKYIKNKIPVQGRLGNFKLDTAEFEKKLNTILFVLNESNLAQRFSILVRKHYLKERPIDPIYVNILDDNSYSTLEGFNISSQGSNDFQGQLLESSYFEKIESNALRAFIKICPRNGLLYNAIYRNSKNYLNNIDLEDKKTTSKTNVSYPCSLLNGSIEVENKDLFLISNKDSLNDINLSEEKIKPETTVFFKDKLPPQDITLSNYDFTEANSIPSISQQNILERNEELYEPIRNSLFEIKTIYVDKLTTFHFLEAQNIDESIDSSKIRVELTDSVDEALSNPNKVYSPFKNMSNTINSIETGITSTYIFYQWLRSIVKDFSDETGKIDVIDKSSDTLAIVPYIGPLLNIGNDIRHGDFVGAIELAGITALLEYVPEFTIPILVGLEVIGGELAREQVEAIVNNALDKRDQKWAEVYNITKAQWWGTIHLQINTRLAHTYKALSRQANAIKMNMEFQLANYKGNIDDKAKIKNAISETEILLNKSVEQAMKNTEKFMIKLSNSYLTKEMIPKVQDNLKNFDLETKKTLDKFIKEKEDILGTNLSSSLRRKVSIRLNKNIAFDINDIPFSEFDDLINQYKNEIEDYEVLNLGAEDGKIKDLSGTTSDINIGSDIELADGRENKAIKIKGSENSTIKIAMNKYLRFSATDNFSISFWIKHPKPTNLLNNGIEYTLVENFNQRGWKISIQDSKLIWYLRDHNNSIKIVTPDYIAFNGWNLITITNNRSKGSIVYVNGSKIEEKDISSIWNTEVDDPIIFRLKNNRDTQAFTLLDQFSIYRKELNQNEVVKLYNYYFNSNYIRDIWGNPLQYNKKYYLQTQDKPGKGLIREYWSSFGYDYVILSDSKTITFPNNIRYGALYNGSKVLIKNSKKLDGLVRNKDFIQLEIDGYNMGISADRFNEDTNYIGTTYGTTHDLTTDFEIIQRQEKYRNYAQLKTPYNIFHKSGLMSTETSKPTFHDYRDWVYSSAWYFQNYENLNLRKHTKTNWYFIPKDEGWDED

SEQ ID NO: 72 - protein, 1306 aa, Artificial Sequence
  Synthetic polypeptide
MKLEINKFNYNDPIDGINVITMRPPRHSDKINKGKGPFKAFQVIKNIWIVPERYNFTNNTNDLNIPSEPIMEADAIYNPNYLNTPSEKDEFLQGVIKVLERIKSKPEGEKLLELISSSIPLPLVSNGALTLSDNETIAYQENNNIVSNLQANLVIYGPGPDIANNATYGLYSTPISNGEGTLSEVSFSPFYLKPFDESYGNYRSLVNIVNKFVKREFAPDPASTLMHELVHVTHNLYGISNRNFYYNFDTGKIETSRQQNSLIFEELLTFGGIDSKAISSLIIKKIIETAKNNYTTLISERLNTVTVENDLLKYIKNKIPVQGRLGNFKLDTAEFEKKLNTILFVLNESNLAQRFSILVRKHYLKERPIDPIYVNILDDNSYSTLEGFNISSQGSNDFQGQLLESSYFEKIESNALRAFIKICPRNGLLYNAIYRNSKNYLNNIDLEDKKTTSKTNVSYPCSLLNGSIEVENKDLFLISNKDSLNDINLSEEKIKPETTVFFKDKLPPQDITLSNYDFTEANSIPSISQQNILERNEELYEPIRNSLFEIKTIYVDKLTTFHFLEAQNIDESIDSSKIRVELTDSVDEALSNPNKVYSPFKNMSNTINSIETGITSTYIFYQWLRSIVKDFSDETGKIDVIDKSSDTLAIVPYIGPLLNIGNDIRHGDFVGAIELAGITALLEYVPEFTIPILVGLEVIGGELAREQVEAIVNNALDKRDQKWAEVYNITKAQWWGTIHLQINTRLAHTYKALSRQANAIKMNMEFQLANYKGNIDDKAKIKNAISETEILLNKSVEQAMKNTEKFMIKLSNSYLTKEMIPKVQDNLKNFDLETKKTLDKFIKEKEDILGTNLSSSLRRKVSIRLNKNIAFDINDIPFSEFDDLINQYKNEIEDYEVLNLGAEDGKIKDLSGTTSDINIGSDIELADGRENKAIKIKGSENSTIKIAMNKYLRFSATDNFSISFWIKHPKPTNLLNNGIEYTLVENFNQRGWKISIQDSKLIWYLRDHNNSIKIVTPDYIAFNGWNLITITNNRSKGSIVYVNGSKIEEKDISSIWNTEVDDPIIFRLKNNRDTQAFTLLDQFSIYRKELNQNEVVKLYNYYFNSNYIRDIWGNPLQYNKKYYLQTQDKPGKGLIREYWSSFGYDYVILSDSKTITFPNNIRYGALYNGSKVLIKNSKKLDGLVRNKDFIQLEIDGYNMGISADRFNEDTNYIGTTYGTTHDLTTDFEIIQRQEKYRNYSQLKTPYNIFHKSGLMSTETSKPTFHDYRDWVYSSAWYFQNYENLNLRKHTKTNWYFIPKDEGWDED

SEQ ID NO: 73 - protein, 1306 aa, Artificial Sequence
  Synthetic polypeptide
MKLEINKFNYNDPIDGINVITMRPPRHSDKINKGKGPFKAFQVIKNIWIVPERYNFTNNTNDLNIPSEPIMEADAIYNPNYLNTPSEKDEFLQGVIKVLERIKSKPEGEKLLELISSSIPLPLVSNGALTLSDNETIAYQENNNIVSNLQANLVIYGPGPDIANNATYGLYSTPISNGEGTLSEVSFSPFYLKPFDESYGNYRSLVNIVNKFVKREFAPDPASTLMHELVHVTHNLYGISNRNFYYNFDTGKIETSRQQNSLIFEELLTFGGIDSKAISSLIIKKIIETAKNNYTTLISERLNTVTVENDLLKYIKNKIPVQGRLGNFKLDTAEFEKKLNTILFVLNESNLAQRFSILVRKHYLKERPIDPIYVNILDDNSYSTLEGFNISSQGSNDFQGQLLESSYFEKIESNALRAFIKICPRNGLLYNAIYRNSKNYLNNIDLEDKKTTSKTNVSYPCSLLNGAIEVENKDLFLISNKDSLNDINLSEEKIKPETTVFFKDKLPPQDITLSNYDFTEANSIPSISQQNILERNEELYEPIRNSLFEIKTIYVDKLTTFHFLEAQNIDESIDSSKIRVELTDSVDEALSNPNKVYSPFKNMSNTINSIETGITSTYIFYQWLRSIVKDFSDETGKIDVIDKSSDTLAIVPYIGPLLNIGNDIRHGDFVGAIELAGITALLEYVPEFTIPILVGLEVIGGELAREQVEAIVNNALDKRDQKWAEVYNITKAQWWGTIHLQINTRLAHTYKALSRQANAIKMNMEFQLANYKGNIDDKAKIKNAISETEILLNKSVEQAMKNTEKFMIKLSNSYLTKEMIPKVQDNLKNFDLETKKTLDKFIKEKEDILGTNLSSSLRRKVSIRLNKNIAFDINDIPFSEFDDLINQYKNEIEDYEVLNLGAEDGKIKDLSGTTSDINIGSDIELADGRENKAIKIKGSENSTIKIAMNKYLRFSATDNFSISFWIKHPKPTNLLNNGIEYTLVENFNQRGWKISIQDSKLIWYLRDHNNSIKIVTPDYIAFNGWNLITITNNRSKGSIVYVNGSKIEEKDISSIWNTEVDDPIIFRLKNNRDTQAFTLLDQFSIYRKELNQNEVVKLYNYYFNSNYIRDIWGNPLQYNKKYYLQTQDKPGKGLIREYWSSFGYDYVILSDSKTITFPNNIRYGALYNGSKVLIKNSKKLDGLVRNKDFIQLEIDGYNMGISADRFNEDTNYIGTTYGTTHDLTTDFEIIQRQEKYRNYSQLKTPYNIFHKSGLMSTETSKPTFHDYRDWVYSSAWYFQNYENLNLRKHTKTNWYFIPKDEGWDED

SEQ ID NO: 74 - protein, 1306 aa, Artificial Sequence
  Synthetic polypeptide
MKLEINKFNYNDPIDGINVITMRPPRHSDKINKGKGPFKAFQVIKNIWIVPERYNFTNNTNDLNIPSEPIMEADAIYNPNYLNTPSEKDEFLQGVIKVLERIKSKPEGEKLLELISSSIPLPLVSNGALTLSDNETIAYQENNNIVSNLQANLVIYGPGPDIANNATYGLYSTPISNGEGTLSEVSFSPFYLKPFDESYGNYRSLVNIVNKFVKREFAPDPASTLMHELVHVTHNLYGISNRNFYYNFDTGKIETSRQQNSLIFEELLTFGGIDSKAISSLIIKKIIETAKNNYTTLISERLNTVTVENDLLKYIKNKIPVQGRLGNFKLDTAEFEKKLNTILFVLNESNLAQRFSILVRKHYLKERPIDPIYVNILDDNSYSTLEGFNISSQGSNDFQGQLLESSYFEKIESNALRAFIKICPRNGLLYNAIYRNSKNYLNNIDLEDKKTTSKTNVSYPCSLLNGAIEVENKDLFLISNKDSLNDINLSEEKIKPETTVFFKDKLPPQDITLSNYDFTEANSIPSISQQNILERNEELYEPIRNSLFEIKTIYVDKLTTFHFLEAQNIDESIDSSKIRVELTDSVDEALSNPNKVYSPFKNMSNTINSIETGITSTYIFYQWLRSIVKDFSDETGKIDVIDKSSDTLAIVPYIGPLLNIGNDIRHGDFVGAIELAGITALLEYVPEFTIPILVGLEVIGGELAREQVEAIVNNALDKRDQKWAEVYNITKAQWWGTIHLQINTRLAHTYKALSRQANAIKMNMEFQLANYKGNIDDKAKIKNAISETEILLNKSVEQAMKNTEKFMIKLSNSYLTKEMIPKVQDNLKNFDLETKKTLDKFIKEKEDILGTNLSSSLRRKVSIRLNKNIAFDINDIPFSEFDDLINQYKNEIEDYEVLNLGAEDGKIKDLSGTTSDINIGSDIELADGRENKAIKIKGSENSTIKIAMNKYLRFSATDNFSISFWIKHPKPTNLLNNGIEYTLVENFNQRGWKISIQDSKLIWYLRDHNNSIKIVTPDYIAFNGWNLITITNNRSKGSIVYVNGSKIEEKDISSIWNTEVDDPIIFRLKNNRDTQAFTLLDQFSIYRKELNQNEVVKLYNYYFNSNYIRDIWGNPLQYNKKYYLQTQDKPGKGLIREYWSSFGYDYVILSDSKTITFPNNIRYGALYNGSKVLIKNSKKLDGLVRNKDFIQLEIDGYNMGISADRFNEDTNYIGTTYGTTHDLTTDFEIIQRQEKYRNYAQLKTPYNIFHKSGLMSTETSKPTFHDYRDWVYSSAWYFQNYENLNLRKHTKTNWYFIPKDEGWDED

SEQ ID NO: 75 - protein, 892 aa, Artificial Sequence
  Synthetic polypeptide
MKLEINKFNYNDPIDGINVITMRPPRHSDKINKGKGPFKAFQVIKNIWIVPERYNFTNNTNDLNIPSEPIMEADAIYNPNYLNTPSEKDEFLQGVIKVLERIKSKPEGEKLLELISSSIPLPLVSNGALTLSDNETIAYQENNNIVSNLQANLVIYGPGPDIANNATYGLYSTPISNGEGTLSEVSFSPFYLKPFDESYGNYRSLVNIVNKFVKREFAPDPASTLMHELVHVTHNLYGISNRNFYYNFDTGKIETSRQQNSLIFEELLTFGGIDSKAISSLIIKKIIETAKNNYTTLISERLNTVTVENDLLKYIKNKIPVQGRLGNFKLDTAEFEKKLNTILFVLNESNLAQRFSILVRKHYLKERPIDPIYVNILDDNSYSTLEGFNISSQGSNDFQGQLLESSYFEKIESNALRAFIKICPRNGLLYNAIYRNSKNYLNNIDLEDKKTTSKTNVSYPASLLNGCIEVENKDLFLISNKDSLNDINLSEEKIKPETTVFFKDKLPPQDITLSNYDFTEANSIPSISQQNILERNEELYEPIRNSLFEIKTIYVDKLTTFHFLEAQNIDESIDSSKIRVELTDSVDEALSNPNKVYSPFKNMSNTINSIETGITSTYIFYQWLRSIVKDFSDETGKIDVIDKSSDTLAIVPYIGPLLNIGNDIRHGDFVGAIELAGITALLEYVPEFTIPILVGLEVIGGELAREQVEAIVNNALDKRDQKWAEVYNITKAQWWGTIHLQINTRLAHTYKALSRQANAIKMNMEFQLANYKGNIDDKAKIKNAISETEILLNKSVEQAMKNTEKFMIKLSNSYLTKEMIPKVQDNLKNFDLETKKTLDKFIKEKEDILGTNLSSSLRRKVSIRLNKNIAFDINDIPFSEFDDLINQYKNEI

SEQ ID NO: 76 - protein, 892 aa, Artificial Sequence
  Synthetic polypeptide
MKLEINKFNYNDPIDGINVITMRPPRHSDKINKGKGPFKAFQVIKNIWIVPERYNFTNNTNDLNIPSEPIMEADAIYNPNYLNTPSEKDEFLQGVIKVLERIKSKPEGEKLLELISSSIPLPLVSNGALTLSDNETIAYQENNNIVSNLQANLVIYGPGPDIANNATYGLYSTPISNGEGTLSEVSFSPFYLKPFDESYGNYRSLVNIVNKFVKREFAPDPASTLMHELVHVTHNLYGISNRNFYYNFDTGKIETSRQQNSLIFEELLTFGGIDSKAISSLIIKKIIETAKNNYTTLISERLNTVTVENDLLKYIKNKIPVQGRLGNFKLDTAEFEKKLNTILFVLNESNLAQRFSILVRKHYLKERPIDPIYVNILDDNSYSTLEGFNISSQGSNDFQGQLLESSYFEKIESNALRAFIKICPRNGLLYNAIYRNSKNYLNNIDLEDKKTTSKTNVSYPSSLLNGCIEVENKDLFLISNKDSLNDINLSEEKIKPETTVFFKDKLPPQDITLSNYDFTEANSIPSISQQNILERNEELYEPIRNSLFEIKTIYVDKLTTFHFLEAQNIDESIDSSKIRVELTDSVDEALSNPNKVYSPFKNMSNTINSIETGITSTYIFYQWLRSIVKDFSDETGKIDVIDKSSDTLAIVPYIGPLLNIGNDIRHGDFVGAIELAGITALLEYVPEFTIPILVGLEVIGGELAREQVEAIVNNALDKRDQKWAEVYNITKAQWWGTIHLQINTRLAHTYKALSRQANAIKMNMEFQLANYKGNIDDKAKIKNAISETEILLNKSVEQAMKNTEKFMIKLSNSYLTKEMIPKVQDNLKNFDLETKKTLDKFIKEKEDILGTNLSSSLRRKVSIRLNKNIAFDINDIPFSEFDDLINQYKNEI

SEQ ID NO: 77 - protein, 892 aa, Artificial Sequence
  Synthetic polypeptide
MKLEINKFNYNDPIDGINVITMRPPRHSDKINKGKGPFKAFQVIKNIWIVPERYNFTNNTNDLNIPSEPIMEADAIYNPNYLNTPSEKDEFLQGVIKVLERIKSKPEGEKLLELISSSIPLPLVSNGALTLSDNETIAYQENNNIVSNLQANLVIYGPGPDIANNATYGLYSTPISNGEGTLSEVSFSPFYLKPFDESYGNYRSLVNIVNKFVKREFAPDPASTLMHELVHVTHNLYGISNRNFYYNFDTGKIETSRQQNSLIFEELLTFGGIDSKAISSLIIKKIIETAKNNYTTLISERLNTVTVENDLLKYIKNKIPVQGRLGNFKLDTAEFEKKLNTILFVLNESNLAQRFSILVRKHYLKERPIDPIYVNILDDNSYSTLEGFNISSQGSNDFQGQLLESSYFEKIESNALRAFIKICPRNGLLYNAIYRNSKNYLNNIDLEDKKTTSKTNVSYPCSLLNGAIEVENKDLFLISNKDSLNDINLSEEKIKPETTVFFKDKLPPQDITLSNYDFTEANSIPSISQQNILERNEELYEPIRNSLFEIKTIYVDKLTTFHFLEAQNIDESIDSSKIRVELTDSVDEALSNPNKVYSPFKNMSNTINSIETGITSTYIFYQWLRSIVKDFSDETGKIDVIDKSSDTLAIVPYIGPLLNIGNDIRHGDFVGAIELAGITALLEYVPEFTIPILVGLEVIGGELAREQVEAIVNNALDKRDQKWAEVYNITKAQWWGTIHLQINTRLAHTYKALSRQANAIKMNMEFQLANYKGNIDDKAKIKNAISETEILLNKSVEQAMKNTEKFMIKLSNSYLTKEMIPKVQDNLKNFDLETKKTLDKFIKEKEDILGTNLSSSLRRKVSIRLNKNIAFDINDIPFSEFDDLINQYKNEI

SEQ ID NO: 78 - protein, 892 aa, Artificial Sequence
  Synthetic polypeptide
MKLEINKFNYNDPIDGINVITMRPPRHSDKINKGKGPFKAFQVIKNIWIVPERYNFTNNTNDLNIPSEPIMEADAIYNPNYLNTPSEKDEFLQGVIKVLERIKSKPEGEKLLELISSSIPLPLVSNGALTLSDNETIAYQENNNIVSNLQANLVIYGPGPDIANNATYGLYSTPISNGEGTLSEVSFSPFYLKPFDESYGNYRSLVNIVNKFVKREFAPDPASTLMHELVHVTHNLYGISNRNFYYNFDTGKIETSRQQNSLIFEELLTFGGIDSKAISSLIIKKIIETAKNNYTTLISERLNTVTVENDLLKYIKNKIPVQGRLGNFKLDTAEFEKKLNTILFVLNESNLAQRFSILVRKHYLKERPIDPIYVNILDDNSYSTLEGFNISSQGSNDFQGQLLESSYFEKIESNALRAFIKICPRNGLLYNAIYRNSKNYLNNIDLEDKKTTSKTNVSYPCSLLNGSIEVENKDLFLISNKDSLNDINLSEEKIKPETTVFFKDKLPPQDITLSNYDFTEANSIPSISQQNILERNEELYEPIRNSLFEIKTIYVDKLTTFHFLEAQNIDESIDSSKIRVELTDSVDEALSNPNKVYSPFKNMSNTINSIETGITSTYIFYQWLRSIVKDFSDETGKIDVIDKSSDTLAIVPYIGPLLNIGNDIRHGDFVGAIELAGITALLEYVPEFTIPILVGLEVIGGELAREQVEAIVNNALDKRDQKWAEVYNITKAQWWGTIHLQINTRLAHTYKALSRQANAIKMNMEFQLANYKGNIDDKAKIKNAISETEILLNKSVEQAMKNTEKFMIKLSNSYLTKEMIPKVQDNLKNFDLETKKTLDKFIKEKEDILGTNLSSSLRRKVSIRLNKNIAFDINDIPFSEFDDLINQYKNEI

SEQ ID NO: 79 - protein, 1316 aa, Artificial Sequence
  Synthetic polypeptide
MKLEINKFNYNDPIDGINVITMRPPRHSDKINKGKGPFKAFQVIKNIWIVPERYNFTNNTNDLNIPSEPIMEADAIYNPNYLNTPSEKDEFLQGVIKVLERIKSKPEGEKLLELISSSIPLPLVSNGALTLSDNETIAYQENNNIVSNLQANLVIYGPGPDIANNATYGLYSTPISNGEGTLSEVSFSPFYLKPFDESYGNYRSLVNIVNKFVKREFAPDPASTLMHELVHVTHNLYGISNRNFYYNFDTGKIETSRQQNSLIFEELLTFGGIDSKAISSLIIKKIIETAKNNYTTLISERLNTVTVENDLLKYIKNKIPVQGRLGNFKLDTAEFEKKLNTILFVLNESNLAQRFSILVRKHYLKERPIDPIYVNILDDNSYSTLEGFNISSQGSNDFQGQLLESSYFEKIESNALRAFIKICPRNGLLYNAIYRNSKNYLNNIDLEDKKTTSKTNVSYPCSLLNGCIEVENKDLFLISNKDSLNDINLSEEKIKPETTVFFKDKLPPQDITLSNYDFTEANSIPSISQQNILERNEELYEPIRNSLFEIKTIYVDKLTTFHFLEAQNIDESIDSSKIRVELTDSVDEALSNPNKVYSPFKNMSNTINSIETGITSTYIFYQWLRSIVKDFSDETGKIDVIDKSSDTLAIVPYIGPLLNIGNDIRHGDFVGAIELAGITALLEYVPEFTIPILVGLEVIGGELAREQVEAIVNNALDKRDQKWAEVYNITKAQWWGTIHLQINTRLAHTYKALSRQANAIKMNMEFQLANYKGNIDDKAKIKNAISETEILLNKSVEQAMKNTEKFMIKLSNSYLTKEMIPKVQDNLKNFDLETKKTLDKFIKEKEDILGTNLSSSLRRKVSIRLNKNIAFDINDIPFSEFDDLINQYKNEIIINTSILNLRYESNHLIDLSRYASKINIGSKVNFDPIDKNQIQLFNLESSKIEVILKNAIVYNSMYENFSTSFWIRIPKYFNSISLNNEYTIINCMENNSGWKVSLNYGEIIWTLQDTQEIKQRVVFKYSQMINISDYINRWIFVTITNNRLNNSKIYINGRLIDQKPISNLGNIHASNNIMFKLDGCRDTHRYIWIKYFNLFDKELNEKEIKDLYDNQSNSGILKDFWGDYLQYDKPYYMLNLYDPNKYVDVNNVGIRGYMYLKGPRGSVMTTNIYLNSSLYRGTKFIIKKYASGNKDNIVRNNDRVYINVVVKNKEYRLATNASQAGVEKILSALEIPDVGNLSQVVVMKSKNDQGITNKCKMNLQDNNGNDIGFIGFHQFNNIAKLVASNWYNRQIERSSRTLGCSWEFIPVDDGWGERPL

SEQ ID NO: 80 - protein, 1324 aa, Artificial Sequence
  Synthetic polypeptide
MKLEINKFNYNDPIDGINVITMRPPRHSDKINKGKGPFKAFQVIKNIWIVPERYNFTNNTNDLNIPSEPIMEADAIYNPNYLNTPSEKDEFLQGVIKVLERIKSKPEGEKLLELISSSIPLPLVSNGALTLSDNETIAYQENNNIVSNLQANLVIYGPGPDIANNATYGLYSTPISNGEGTLSEVSFSPFYLKPFDESYGNYRSLVNIVNKFVKREFAPDPASTLMHELVHVTHNLYGISNRNFYYNFDTGKIETSRQQNSLIFEELLTFGGIDSKAISSLIIKKIIETAKNNYTTLISERLNTVTVENDLLKYIKNKIPVQGRLGNFKLDTAEFEKKLNTILFVLNESNLAQRFSILVRKHYLKERPIDPIYVNILDDNSYSTLEGFNISSQGSNDFQGQLLESSYFEKIESNALRAFIKICPRNGLLYNAIYRNSKNYLNNIDLEDKKTTSKTNVSYPCSLLNGCIEVENKDLFLISNKDSLNDINLSEEKIKPETTVFFKDKLPPQDITLSNYDFTEANSIPSISQQNILERNEELYEPIRNSLFEIKTIYVDKLTTFHFLEAQNIDESIDSSKIRVELTDSVDEALSNPNKVYSPFKNMSNTINSIETGITSTYIFYQWLRSIVKDFSDETGKIDVIDKSSDTLAIVPYIGPLLNIGNDIRHGDFVGAIELAGITALLEYVPEFTIPILVGLEVIGGELAREQVEAIVNNALDKRDQKWAEVYNITKAQWWGTIHLQINTRLAHTYKALSRQANAIKMNMEFQLANYKGNIDDKAKIKNAISETEILLNKSVEQAMKNTEKFMIKLSNSYLTKEMIPKVQDNLKNFDLETKKTLDKFIKEKEDILGTNLSSSLRRKVSIRLNKNIAFDINDIPFSEFDDLINQYKNEIILNNIILNLRYKDNNLIDLSGYGAKVEVYDGVELNDKNQFKLTSSANSKIRVTQNQNIIFNSVFLDFSVSFWIRIPKYKNDGIQNYIHNEYTIINCMKNNSGWKISIRGNRIIWTLIDINGKTKSVFFEYNIREDISEYINRWFFVTITNNLNNAKIYINGKLESNTDIKDIREVIANGEIIFKLDGDIDRTQFIWMKYFSIFNTELSQSNIEERYKIQSYSEYLKDFWGNPLMYNKEYYMFNAGNKNSYIKLKKDSPVGEILTRSKYNQNSKYINYRDLYIGEKFIIRRKSNSQSINDDIVRKEDYIYLDFFNLNQEWRVYTYKYFKKEEEKLFLAPISDSDEFYNTIQIKEYDEQPTYSCQLLFKKDEESTDEIGLIGIHRFYESGIVFEEYKDYFCISKWYLKEVKRKPYNLKLGCNWQFIPKDEGWTE

SEQ ID NO: 81 - protein, 1316 aa, Artificial Sequence
  Synthetic polypeptide
MKLEINKFNYNDPIDGINVITMRPPRHSDKINKGKGPFKAFQVIKNIWIVPERYNFTNNTNDLNIPSEPIMEADAIYNPNYLNTPSEKDEFLQGVIKVLERIKSKPEGEKLLELISSSIPLPLVSNGALTLSDNETIAYQENNNIVSNLQANLVIYGPGPDIANNATYGLYSTPISNGEGTLSEVSFSPFYLKPFDESYGNYRSLVNIVNKFVKREFAPDPASTLMHELVHVTHNLYGISNRNFYYNFDTGKIETSRQQNSLIFEELLTFGGIDSKAISSLIIKKIIETAKNNYTTLISERLNTVTVENDLLKYIKNKIPVQGRLGNFKLDTAEFEKKLNTILFVLNESNLAQRFSILVRKHYLKERPIDPIYVNILDDNSYSTLEGFNISSQGSNDFQGQLLESSYFEKIESNALRAFIKICPRNGLLYNAIYRNSKNYLNNIDLEDKKTTSKTNVSYPCSLLNGCIEVENKDLFLISNKDSLNDINLSEEKIKPETTVFFKDKLPPQDITLSNYDFTEANSIPSISQQNILERNEELYEPIRNSLFEIKTIYVDKLTTFHFLEAQNIDESIDSSKIRVELTDSVDEALSNPNKVYSPFKNMSNTINSIETGITSTYIFYQWLRSIVKDFSDETGKIDVIDKSSDTLAIVPYIGPLLNIGNDIRHGDFVGAIELAGITALLEYVPEFTIPILVGLEVIGGELAREQVEAIVNNALDKRDQKWAEVYNITKAQWWGTIHLQINTRLAHTYKALSRQANAIKMNMEFQLANYKGNIDDKAKIKNAISETEILLNKSVEQAMKNTEKFMIKLSNSYLTKEMIPKVQDNLKNFDLETKKTLDKFIKEKEDILGTNLSSSLRRKVSIRLNKNIAFDINDIPFSEFDDLINQYKNEIINDSKILSLQNRKNTLVDTSGYNAEVSEEGDVQLNPIFPFDFKLGSSGEDRGKVIVTQNENIVYNSMYESFSISFWIRINKWVSNLPGYTIIDSVKNNSGWSIGIISNFLVFTLKQNEDSEQSINFSYDISNNAPGYNKWFFVTVTNNMMGNMKIYINGKLIDTIKVKELTGINFSKTITFEINKIPDTGLITSDSDNINMWIRDFYIFAKELDGKDINILFNSLQYTNVVKDYWGNDLRYNKEYYMVNIDYLNRYMYANSRQIVFNTRRNNNDFNEGYKIIIKRIRGNTNDTRVRGGDILYFDMTINNKAYNLFMKNETMYADNHSTEDIYAIGLREQTKDINDNIIFQIQPMNNTYYYASQIFKSNFNGENISGICSIGTYRFRLGGDWYRHNYLVPTVKQGNYASLLESTSTHWGFVPVSE

SEQ ID NO: 82 - protein, 1316 aa, Artificial Sequence
  Synthetic polypeptide
MKLEINKFNYNDPIDGINVITMRPPRHSDKINKGKGPFKAFQVIKNIWIVPERYNFTNNTNDLNIPSEPIMEADAIYNPNYLNTPSEKDEFLQGVIKVLERIKSKPEGEKLLELISSSIPLPLVSNGALTLSDNETIAYQENNNIVSNLQANLVIYGPGPDIANNATYGLYSTPISNGEGTLSEVSFSPFYLKPFDESYGNYRSLVNIVNKFVKREFAPDPASTLMHELVHVTHNLYGISNRNFYYNFDTGKIETSRQQNSLIFEELLTFGGIDSKAISSLIIKKIIETAKNNYTTLISERLNTVTVENDLLKYIKNKIPVQGRLGNFKLDTAEFEKKLNTILFVLNESNLAQRFSILVRKHYLKERPIDPIYVNILDDNSYSTLEGFNISSQGSNDFQGQLLESSYFEKIESNALRAFIKICPRNGLLYNAIYRNSKNYLNNIDLEDKKTTSKTNVSYPSSLLNGCIEVENKDLFLISNKDSLNDINLSEEKIKPETTVFFKDKLPPQDITLSNYDFTEANSIPSISQQNILERNEELYEPIRNSLFEIKTIYVDKLTTFHFLEAQNIDESIDSSKIRVELTDSVDEALSNPNKVYSPFKNMSNTINSIETGITSTYIFYQWLRSIVKDFSDETGKIDVIDKSSDTLAIVPYIGPLLNIGNDIRHGDFVGAIELAGITALLEYVPEFTIPILVGLEVIGGELAREQVEAIVNNALDKRDQKWAEVYNITKAQWWGTIHLQINTRLAHTYKALSRQANAIKMNMEFQLANYKGNIDDKAKIKNAISETEILLNKSVEQAMKNTEKFMIKLSNSYLTKEMIPKVQDNLKNFDLETKKTLDKFIKEKEDILGTNLSSSLRRKVSIRLNKNIAFDINDIPFSEFDDLINQYKNEIIINTSILNLRYESNHLIDLSRYASKINIGSKVNFDPIDKNQIQLFNLESSKIEVILKNAIVYNSMYENFSTSFWIRIPKYFNSISLNNEYTIINCMENNSGWKVSLNYGEIIWTLQDTQEIKQRVVFKYSQMINISDYINRWIFVTITNNRLNNSKIYINGRLIDQKPISNLGNIHASNNIMFKLDGCRDTHRYIWIKYFNLFDKELNEKEIKDLYDNQSNSGILKDFWGDYLQYDKPYYMLNLYDPNKYVDVNNVGIRGYMYLKGPRGSVMTTNIYLNSSLYRGTKFIIKKYASGNKDNIVRNNDRVYINVVVKNKEYRLATNASQAGVEKILSALEIPDVGNLSQVVVMKSKNDQGITNKCKMNLQDNNGNDIGFIGFHQFNNIAKLVASNWYNRQIERSSRTLGCSWEFIPVDDGWGERPL

SEQ ID NO: 83 - protein, 1324 aa, Artificial Sequence
  Synthetic polypeptide
MKLEINKFNYNDPIDGINVITMRPPRHSDKINKGKGPFKAFQVIKNIWIVPERYNFTNNTNDLNIPSEPIMEADAIYNPNYLNTPSEKDEFLQGVIKVLERIKSKPEGEKLLELISSSIPLPLVSNGALTLSDNETIAYQENNNIVSNLQANLVIYGPGPDIANNATYGLYSTPISNGEGTLSEVSFSPFYLKPFDESYGNYRSLVNIVNKFVKREFAPDPASTLMHELVHVTHNLYGISNRNFYYNFDTGKIETSRQQNSLIFEELLTFGGIDSKAISSLIIKKIIETAKNNYTTLISERLNTVTVENDLLKYIKNKIPVQGRLGNFKLDTAEFEKKLNTILFVLNESNLAQRFSILVRKHYLKERPIDPIYVNILDDNSYSTLEGFNISSQGSNDFQGQLLESSYFEKIESNALRAFIKICPRNGLLYNAIYRNSKNYLNNIDLEDKKTTSKTNVSYPSSLLNGCIEVENKDLFLISNKDSLNDINLSEEKIKPETTVFFKDKLPPQDITLSNYDFTEANSIPSISQQNILERNEELYEPIRNSLFEIKTIYVDKLTTFHFLEAQNIDESIDSSKIRVELTDSVDEALSNPNKVYSPFKNMSNTINSIETGITSTYIFYQWLRSIVKDFSDETGKIDVIDKSSDTLAIVPYIGPLLNIGNDIRHGDFVGAIELAGITALLEYVPEFTIPILVGLEVIGGELAREQVEAIVNNALDKRDQKWAEVYNITKAQWWGTIHLQINTRLAHTYKALSRQANAIKMNMEFQLANYKGNIDDKAKIKNAISETEILLNKSVEQAMKNTEKFMIKLSNSYLTKEMIPKVQDNLKNFDLETKKTLDKFIKEKEDILGTNLSSSLRRKVSIRLNKNIAFDINDIPFSEFDDLINQYKNEIILNNIILNLRYKDNNLIDLSGYGAKVEVYDGVELNDKNQFKLTSSANSKIRVTQNQNIIFNSVFLDFSVSFWIRIPKYKNDGIQNYIHNEYTIINCMKNNSGWKISIRGNRIIWTLIDINGKTKSVFFEYNIREDISEYINRWFFVTITNNLNNAKIYINGKLESNTDIKDIREVIANGEIIFKLDGDIDRTQFIWMKYFSIFNTELSQSNIEERYKIQSYSEYLKDFWGNPLMYNKEYYMFNAGNKNSYIKLKKDSPVGEILTRSKYNQNSKYINYRDLYIGEKFIIRRKSNSQSINDDIVRKEDYIYLDFFNLNQEWRVYTYKYFKKEEEKLFLAPISDSDEFYNTIQIKEYDEQPTYSCQLLFKKDEESTDEIGLIGIHRFYESGIVFEEYKDYFCISKWYLKEVKRKPYNLKLGCNWQFIPKDEGWTE

SEQ ID NO: 84 - protein, 1316 aa, Artificial Sequence
  Synthetic polypeptide
MKLEINKFNYNDPIDGINVITMRPPRHSDKINKGKGPFKAFQVIKNIWIVPERYNFTNNTNDLNIPSEPIMEADAIYNPNYLNTPSEKDEFLQGVIKVLERIKSKPEGEKLLELISSSIPLPLVSNGALTLSDNETIAYQENNNIVSNLQANLVIYGPGPDIANNATYGLYSTPISNGEGTLSEVSFSPFYLKPFDESYGNYRSLVNIVNKFVKREFAPDPASTLMHELVHVTHNLYGISNRNFYYNFDTGKIETSRQQNSLIFEELLTFGGIDSKAISSLIIKKIIETAKNNYTTLISERLNTVTVENDLLKYIKNKIPVQGRLGNFKLDTAEFEKKLNTILFVLNESNLAQRFSILVRKHYLKERPIDPIYVNILDDNSYSTLEGFNISSQGSNDFQGQLLESSYFEKIESNALRAFIKICPRNGLLYNAIYRNSKNYLNNIDLEDKKTTSKTNVSYPSSLLNGCIEVENKDLFLISNKDSLNDINLSEEKIKPETTVFFKDKLPPQDITLSNYDFTEANSIPSISQQNILERNEELYEPIRNSLFEIKTIYVDKLTTFHFLEAQNIDESIDSSKIRVELTDSVDEALSNPNKVYSPFKNMSNTINSIETGITSTYIFYQWLRSIVKDFSDETGKIDVIDKSSDTLAIVPYIGPLLNIGNDIRHGDFVGAIELAGITALLEYVPEFTIPILVGLEVIGGELAREQVEAIVNNALDKRDQKWAEVYNITKAQWWGTIHLQINTRLAHTYKALSRQANAIKMNMEFQLANYKGNIDDKAKIKNAISETEILLNKSVEQAMKNTEKFMIKLSNSYLTKEMIPKVQDNLKNFDLETKKTLDKFIKEKEDILGTNLSSSLRRKVSIRLNKNIAFDINDIPFSEFDDLINQYKNEIINDSKILSLQNRKNTLVDTSGYNAEVSEEGDVQLNPIFPFDFKLGSSGEDRGKVIVTQNENIVYNSMYESFSISFWIRINKWVSNLPGYTIIDSVKNNSGWSIGIISNFLVFTLKQNEDSEQSINFSYDISNNAPGYNKWFFVTVTNNMMGNMKIYINGKLIDTIKVKELTGINFSKTITFEINKIPDTGLITSDSDNINMWIRDFYIFAKELDGKDINILFNSLQYTNVVKDYWGNDLRYNKEYYMVNIDYLNRYMYANSRQIVFNTRRNNNDFNEGYKIIIKRIRGNTNDTRVRGGDILYFDMTINNKAYNLFMKNETMYADNHSTEDIYAIGLREQTKDINDNIIFQIQPMNNTYYYASQIFKSNFNGENISGICSIGTYRFRLGGDWYRHNYLVPTVKQGNYASLLESTSTHWGFVPVSE

SEQ ID NO: 85 - protein, 1316 aa, Artificial Sequence
  Synthetic polypeptide
MKLEINKFNYNDPIDGINVITMRPPRHSDKINKGKGPFKAFQVIKNIWIVPERYNFTNNTNDLNIPSEPIMEADAIYNPNYLNTPSEKDEFLQGVIKVLERIKSKPEGEKLLELISSSIPLPLVSNGALTLSDNETIAYQENNNIVSNLQANLVIYGPGPDIANNATYGLYSTPISNGEGTLSEVSFSPFYLKPFDESYGNYRSLVNIVNKFVKREFAPDPASTLMHELVHVTHNLYGISNRNFYYNFDTGKIETSRQQNSLIFEELLTFGGIDSKAISSLIIKKIIETAKNNYTTLISERLNTVTVENDLLKYIKNKIPVQGRLGNFKLDTAEFEKKLNTILFVLNESNLAQRFSILVRKHYLKERPIDPIYVNILDDNSYSTLEGFNISSQGSNDFQGQLLESSYFEKIESNALRAFIKICPRNGLLYNAIYRNSKNYLNNIDLEDKKTTSKTNVSYPCSLLNGSIEVENKDLFLISNKDSLNDINLSEEKIKPETTVFFKDKLPPQDITLSNYDFTEANSIPSISQQNILERNEELYEPIRNSLFEIKTIYVDKLTTFHFLEAQNIDESIDSSKIRVELTDSVDEALSNPNKVYSPFKNMSNTINSIETGITSTYIFYQWLRSIVKDFSDETGKIDVIDKSSDTLAIVPYIGPLLNIGNDIRHGDFVGAIELAGITALLEYVPEFTIPILVGLEVIGGELAREQVEAIVNNALDKRDQKWAEVYNITKAQWWGTIHLQINTRLAHTYKALSRQANAIKMNMEFQLANYKGNIDDKAKIKNAISETEILLNKSVEQAMKNTEKFMIKLSNSYLTKEMIPKVQDNLKNFDLETKKTLDKFIKEKEDILGTNLSSSLRRKVSIRLNKNIAFDINDIPFSEFDDLINQYKNEIIINTSILNLRYESNHLIDLSRYASKINIGSKVNFDPIDKNQIQLFNLESSKIEVILKNAIVYNSMYENFSTSFWIRIPKYFNSISLNNEYTIINCMENNSGWKVSLNYGEIIWTLQDTQEIKQRVVFKYSQMINISDYINRWIFVTITNNRLNNSKIYINGRLIDQKPISNLGNIHASNNIMFKLDGCRDTHRYIWIKYFNLFDKELNEKEIKDLYDNQSNSGILKDFWGDYLQYDKPYYMLNLYDPNKYVDVNNVGIRGYMYLKGPRGSVMTTNIYLNSSLYRGTKFIIKKYASGNKDNIVRNNDRVYINVVVKNKEYRLATNASQAGVEKILSALEIPDVGNLSQVVVMKSKNDQGITNKCKMNLQDNNGNDIGFIGFHQFNNIAKLVASNWYNRQIERSSRTLGCSWEFIPVDDGWGERPL

SEQ ID NO: 86 - protein, 1324 aa, Artificial Sequence
  Synthetic polypeptide
MKLEINKFNYNDPIDGINVITMRPPRHSDKINKGKGPFKAFQVIKNIWIVPERYNFTNNTNDLNIPSEPIMEADAIYNPNYLNTPSEKDEFLQGVIKVLERIKSKPEGEKLLELISSSIPLPLVSNGALTLSDNETIAYQENNNIVSNLQANLVIYGPGPDIANNATYGLYSTPISNGEGTLSEVSFSPFYLKPFDESYGNYRSLVNIVNKFVKREFAPDPASTLMHELVHVTHNLYGISNRNFYYNFDTGKIETSRQQNSLIFEELLTFGGIDSKAISSLIIKKIIETAKNNYTTLISERLNTVTVENDLLKYIKNKIPVQGRLGNFKLDTAEFEKKLNTILFVLNESNLAQRFSILVRKHYLKERPIDPIYVNILDDNSYSTLEGFNISSQGSNDFQGQLLESSYFEKIESNALRAFIKICPRNGLLYNAIYRNSKNYLNNIDLEDKKTTSKTNVSYPCSLLNGSIEVENKDLFLISNKDSLNDINLSEEKIKPETTVFFKDKLPPQDITLSNYDFTEANSIPSISQQNILERNEELYEPIRNSLFEIKTIYVDKLTTFHFLEAQNIDESIDSSKIRVELTDSVDEALSNPNKVYSPFKNMSNTINSIETGITSTYIFYQWLRSIVKDFSDETGKIDVIDKSSDTLAIVPYIGPLLNIGNDIRHGDFVGAIELAGITALLEYVPEFTIPILVGLEVIGGELAREQVEAIVNNALDKRDQKWAEVYNITKAQWWGTIHLQINTRLAHTYKALSRQANAIKMNMEFQLANYKGNIDDKAKIKNAISETEILLNKSVEQAMKNTEKFMIKLSNSYLTKEMIPKVQDNLKNFDLETKKTLDKFIKEKEDILGTNLSSSLRRKVSIRLNKNIAFDINDIPFSEFDDLINQYKNEIILNNIILNLRYKDNNLIDLSGYGAKVEVYDGVELNDKNQFKLTSSANSKIRVTQNQNIIFNSVFLDFSVSFWIRIPKYKNDGIQNYIHNEYTIINCMKNNSGWKISIRGNRIIWTLIDINGKTKSVFFEYNIREDISEYINRWFFVTITNNLNNAKIYINGKLESNTDIKDIREVIANGEIIFKLDGDIDRTQFIWMKYFSIFNTELSQSNIEERYKIQSYSEYLKDFWGNPLMYNKEYYMFNAGNKNSYIKLKKDSPVGEILTRSKYNQNSKYINYRDLYIGEKFIIRRKSNSQSINDDIVRKEDYIYLDFFNLNQEWRVYTYKYFKKEEEKLFLAPISDSDEFYNTIQIKEYDEQPTYSCQLLFKKDEESTDEIGLIGIHRFYESGIVFEEYKDYFCISKWYLKEVKRKPYNLKLGCNWQFIPKDEGWTE

SEQ ID NO: 87 - protein, 1316 aa, Artificial Sequence
  Synthetic polypeptide
MKLEINKFNYNDPIDGINVITMRPPRHSDKINKGKGPFKAFQVIKNIWIVPERYNFTNNTNDLNIPSEPIMEADAIYNPNYLNTPSEKDEFLQGVIKVLERIKSKPEGEKLLELISSSIPLPLVSNGALTLSDNETIAYQENNNIVSNLQANLVIYGPGPDIANNATYGLYSTPISNGEGTLSEVSFSPFYLKPFDESYGNYRSLVNIVNKFVKREFAPDPASTLMHELVHVTHNLYGISNRNFYYNFDTGKIETSRQQNSLIFEELLTFGGIDSKAISSLIIKKIIETAKNNYTTLISERLNTVTVENDLLKYIKNKIPVQGRLGNFKLDTAEFEKKLNTILFVLNESNLAQRFSILVRKHYLKERPIDPIYVNILDDNSYSTLEGFNISSQGSNDFQGQLLESSYFEKIESNALRAFIKICPRNGLLYNAIYRNSKNYLNNIDLEDKKTTSKTNVSYPCSLLNGSIEVENKDLFLISNKDSLNDINLSEEKIKPETTVFFKDKLPPQDITLSNYDFTEANSIPSISQQNILERNEELYEPIRNSLFEIKTIYVDKLTTFHFLEAQNIDESIDSSKIRVELTDSVDEALSNPNKVYSPFKNMSNTINSIETGITSTYIFYQWLRSIVKDFSDETGKIDVIDKSSDTLAIVPYIGPLLNIGNDIRHGDFVGAIELAGITALLEYVPEFTIPILVGLEVIGGELAREQVEAIVNNALDKRDQKWAEVYNITKAQWWGTIHLQINTRLAHTYKALSRQANAIKMNMEFQLANYKGNIDDKAKIKNAISETEILLNKSVEQAMKNTEKFMIKLSNSYLTKEMIPKVQDNLKNFDLETKKTLDKFIKEKEDILGTNLSSSLRRKVSIRLNKNIAFDINDIPFSEFDDLINQYKNEIINDSKILSLQNRKNTLVDTSGYNAEVSEEGDVQLNPIFPFDFKLGSSGEDRGKVIVTQNENIVYNSMYESFSISFWIRINKWVSNLPGYTIIDSVKNNSGWSIGIISNFLVFTLKQNEDSEQSINFSYDISNNAPGYNKWFFVTVTNNMMGNMKIYINGKLIDTIKVKELTGINFSKTITFEINKIPDTGLITSDSDNINMWIRDFYIFAKELDGKDINILFNSLQYTNVVKDYWGNDLRYNKEYYMVNIDYLNRYMYANSRQIVFNTRRNNNDFNEGYKIIIKRIRGNTNDTRVRGGDILYFDMTINNKAYNLFMKNETMYADNHSTEDIYAIGLREQTKDINDNIIFQIQPMNNTYYYASQIFKSNFNGENISGICSIGTYRFRLGGDWYRHNYLVPTVKQGNYASLLESTSTHWGFVPVSE

SEQ ID NO: 88 - protein, 1306 aa, Artificial Sequence
  Synthetic polypeptide
MKLEINKFNYNDPIDGINVITMRPPRHSDKINKGKGPFKAFQVIKNIWIVPERYNFTNNTNDLNIPSEPIMEADAIYNPNYLNTPSEKDEFLQGVIKVLERIKSKPEGEKLLELISSSIPLPLVSNGALTLSDNETIAYQENNNIVSNLQANLVIYGPGPDIANNATYGLYSTPISNGEGTLSEVSFSPFYLKPFDESYGNYRSLVNIVNKFVKREFAPDPASTLMHELVHVTHNLYGISNRNFYYNFDTGKIETSRQQNSLIFEELLTFGGIDSKAISSLIIKKIIETAKNNYTTLISERLNTVTVENDLLKYIKNKIPVQGRLGNFKLDTAEFEKKLNTILFVLNESNLAQRFSILVAKHFLKERPIDPIYVNILDDNSYSTLEGFNISSQGSNDFQGQLLESSYFEKIESNALRAFIKICPRNGLLYNAIYRNSKNYLNNIDLEDKKTTSKTNVSYPCSLLNGCIEVENKDLFLISNKDSLNDINLSEEKIKPETTVFFKDKLPPQDITLSNYDFTEANSIPSISQQNILERNEELYEPIRNSLFEIKTIYVDKLTTFHFLEAQNIDESIDSSKIRVELTDSVDEALSNPNKVYSPFKNMSNTINSIETGITSTYIFYQWLRSIVKDFSDETGKIDVIDKSSDTLAIVPYIGPLLNIGNDIRHGDFVGAIELAGITALLEYVPEFTIPILVGLEVIGGELAREQVEAIVNNALDKRDQKWAEVYNITKAQWWGTIHLQINTRLAHTYKALSRQANAIKMNMEFQLANYKGNIDDKAKIKNAISETEILLNKSVEQAMKNTEKFMIKLSNSYLTKEMIPKVQDNLKNFDLETKKTLDKFIKEKEDILGTNLSSSLRRKVSIRLNKNIAFDINDIPFSEFDDLINQYKNEIEDYEVLNLGAEDGKIKDLSGTTSDINIGSDIELADGRENKAIKIKGSENSTIKIAMNKYLRFSATDNFSISFWIKHPKPTNLLNNGIEYTLVENFNQRGWKISIQDSKLIWYLRDHNNSIKIVTPDYIAFNGWNLITITNNRSKGSIVYVNGSKIEEKDISSIWNTEVDDPIIFRLKNNRDTQAFTLLDQFSIYRKELNQNEVVKLYNYYFNSNYIRDIWGNPLQYNKKYYLQTQDKPGKGLIREYWSSFGYDYVILSDSKTITFPNNIRYGALYNGSKVLIKNSKKLDGLVRNKDFIQLEIDGYNMGISADRFNEDTNYIGTTYGTTHDLTTDFEIIQRQEKYRNYCQLKTPYNIFHKSGLMSTETSKPTFHDYRDWVYSSAWYFQNYENLNLRKHTKTNWYFIPKDEGWDED

SEQ ID NO: 89 - protein, 1306 aa, Artificial Sequence
  Synthetic polypeptide
MKLEINKFNYNDPIDGINVITMRPPRHSDKINKGKGPFKAFQVIKNIWIVPERYNFTNNTNDLNIPSEPIMEADAIYNPNYLNTPSEKDEFLQGVIKVLERIKSKPEGEKLLELISSSIPLPLVSNGALTLSDNETIAYQENNNIVSNLQANLVIYGPGPDIANNATYGLYSTPISNGEGTLSEVSFSPFYLKPFDESYGNYRSLVNIVNKFVKREFAPDPASTLMYELVHVTHNLYGISNRNFYYNFDTGKIETSRQQNSLIFEELLTFGGIDSKAISSLIIKKIIETAKNNYTTLISERLNTVTVENDLLKYIKNKIPVQGRLGNFKLDTAEFEKKLNTILFVLNESNLAQRFSILVRKHYLKERPIDPIYVNILDDNSYSTLEGFNISSQGSNDFQGQLLESSYFEKIESNALRAFIKICPRNGLLYNAIYRNSKNYLNNIDLEDKKTTSKTNVSYPCSLLNGCIEVENKDLFLISNKDSLNDINLSEEKIKPETTVFFKDKLPPQDITLSNYDFTEANSIPSISQQNILERNEELYEPIRNSLFEIKTIYVDKLTTFHFLEAQNIDESIDSSKIRVELTDSVDEALSNPNKVYSPFKNMSNTINSIETGITSTYIFYQWLRSIVKDFSDETGKIDVIDKSSDTLAIVPYIGPLLNIGNDIRHGDFVGAIELAGITALLEYVPEFTIPILVGLEVIGGELAREQVEAIVNNALDKRDQKWAEVYNITKAQWWGTIHLQINTRLAHTYKALSRQANAIKMNMEFQLANYKGNIDDKAKIKNAISETEILLNKSVEQAMKNTEKFMIKLSNSYLTKEMIPKVQDNLKNFDLETKKTLDKFIKEKEDILGTNLSSSLRRKVSIRLNKNIAFDINDIPFSEFDDLINQYKNEIEDYEVLNLGAEDGKIKDLSGTTSDINIGSDIELADGRENKAIKIKGSENSTIKIAMNKYLRFSATDNFSISFWIKHPKPTNLLNNGIEYTLVENFNQRGWKISIQDSKLIWYLRDHNNSIKIVTPDYIAFNGWNLITITNNRSKGSIVYVNGSKIEEKDISSIWNTEVDDPIIFRLKNNRDTQAFTLLDQFSIYRKELNQNEVVKLYNYYFNSNYIRDIWGNPLQYNKKYYLQTQDKPGKGLIREYWSSFGYDYVILSDSKTITFPNNIRYGALYNGSKVLIKNSKKLDGLVRNKDFIQLEIDGYNMGISADRFNEDTNYIGTTYGTTHDLTTDFEIIQRQEKYRNYCQLKTPYNIFHKSGLMSTETSKPTFHDYRDWVYSSAWYFQNYENLNLRKHTKTNWYFIPKDEGWDED

SEQ ID NO: 90 - protein, 1306 aa, Artificial Sequence
  Synthetic polypeptide
MKLEINKFNYNDPIDGINVITMRPPRHSDKINKGKGPFKAFQVIKNIWIVPERYNFTNNTNDLNIPSEPIMEADAIYNPNYLNTPSEKDEFLQGVIKVLERIKSKPEGEKLLELISSSIPLPLVSNGALTLSDNETIAYQENNNIVSNLQANLVIYGPGPDIANNATYGLYSTPISNGEGTLSEVSFSPFYLKPFDESYGNYRSLVNIVNKFVKREFAPDPASTLMHQLVHVTHNLYGISNRNFYYNFDTGKIETSRQQNSLIFEELLTFGGIDSKAISSLIIKKIIETAKNNYTTLISERLNTVTVENDLLKYIKNKIPVQGRLGNFKLDTAEFEKKLNTILFVLNESNLAQRFSILVRKHYLKERPIDPIYVNILDDNSYSTLEGFNISSQGSNDFQGQLLESSYFEKIESNALRAFIKICPRNGLLYNAIYRNSKNYLNNIDLEDKKTTSKTNVSYPCSLLNGCIEVENKDLFLISNKDSLNDINLSEEKIKPETTVFFKDKLPPQDITLSNYDFTEANSIPSISQQNILERNEELYEPIRNSLFEIKTIYVDKLTTFHFLEAQNIDESIDSSKIRVELTDSVDEALSNPNKVYSPFKNMSNTINSIETGITSTYIFYQWLRSIVKDFSDETGKIDVIDKSSDTLAIVPYIGPLLNIGNDIRHGDFVGAIELAGITALLEYVPEFTIPILVGLEVIGGELAREQVEAIVNNALDKRDQKWAEVYNITKAQWWGTIHLQINTRLAHTYKALSRQANAIKMNMEFQLANYKGNIDDKAKIKNAISETEILLNKSVEQAMKNTEKFMIKLSNSYLTKEMIPKVQDNLKNFDLETKKTLDKFIKEKEDILGTNLSSSLRRKVSIRLNKNIAFDINDIPFSEFDDLINQYKNEIEDYEVLNLGAEDGKIKDLSGTTSDINIGSDIELADGRENKAIKIKGSENSTIKIAMNKYLRFSATDNFSISFWIKHPKPTNLLNNGIEYTLVENFNQRGWKISIQDSKLIWYLRDHNNSIKIVTPDYIAFNGWNLITITNNRSKGSIVYVNGSKIEEKDISSIWNTEVDDPIIFRLKNNRDTQAFTLLDQFSIYRKELNQNEVVKLYNYYFNSNYIRDIWGNPLQYNKKYYLQTQDKPGKGLIREYWSSFGYDYVILSDSKTITFPNNIRYGALYNGSKVLIKNSKKLDGLVRNKDFIQLEIDGYNMGISADRFNEDTNYIGTTYGTTHDLTTDFEIIQRQEKYRNYCQLKTPYNIFHKSGLMSTETSKPTFHDYRDWVYSSAWYFQNYENLNLRKHTKTNWYFIPKDEGWDED

SEQ ID NO: 91 - protein, 1306 aa, Artificial Sequence
  Synthetic polypeptide
MKLEINKFNYNDPIDGINVITMRPPRHSDKINKGKGPFKAFQVIKNIWIVPERYNFTNNTNDLNIPSEPIMEADAIYNPNYLNTPSEKDEFLQGVIKVLERIKSKPEGEKLLELISSSIPLPLVSNGALTLSDNETIAYQENNNIVSNLQANLVIYGPGPDIANNATYGLYSTPISNGEGTLSEVSFSPFYLKPFDESYGNYRSLVNIVNKFVKREFAPDPASTLMHELVYVTHNLYGISNRNFYYNFDTGKIETSRQQNSLIFEELLTFGGIDSKAISSLIIKKIIETAKNNYTTLISERLNTVTVENDLLKYIKNKIPVQGRLGNFKLDTAEFEKKLNTILFVLNESNLAQRFSILVRKHYLKERPIDPIYVNILDDNSYSTLEGFNISSQGSNDFQGQLLESSYFEKIESNALRAFIKICPRNGLLYNAIYRNSKNYLNNIDLEDKKTTSKTNVSYPCSLLNGCIEVENKDLFLISNKDSLNDINLSEEKIKPETTVFFKDKLPPQDITLSNYDFTEANSIPSISQQNILERNEELYEPIRNSLFEIKTIYVDKLTTFHFLEAQNIDESIDSSKIRVELTDSVDEALSNPNKVYSPFKNMSNTINSIETGITSTYIFYQWLRSIVKDFSDETGKIDVIDKSSDTLAIVPYIGPLLNIGNDIRHGDFVGAIELAGITALLEYVPEFTIPILVGLEVIGGELAREQVEAIVNNALDKRDQKWAEVYNITKAQWWGTIHLQINTRLAHTYKALSRQANAIKMNMEFQLANYKGNIDDKAKIKNAISETEILLNKSVEQAMKNTEKFMIKLSNSYLTKEMIPKVQDNLKNFDLETKKTLDKFIKEKEDILGTNLSSSLRRKVSIRLNKNIAFDINDIPFSEFDDLINQYKNEIEDYEVLNLGAEDGKIKDLSGTTSDINIGSDIELADGRENKAIKIKGSENSTIKIAMNKYLRFSATDNFSISFWIKHPKPTNLLNNGIEYTLVENFNQRGWKISIQDSKLIWYLRDHNNSIKIVTPDYIAFNGWNLITITNNRSKGSIVYVNGSKIEEKDISSIWNTEVDDPIIFRLKNNRDTQAFTLLDQFSIYRKELNQNEVVKLYNYYFNSNYIRDIWGNPLQYNKKYYLQTQDKPGKGLIREYWSSFGYDYVILSDSKTITFPNNIRYGALYNGSKVLIKNSKKLDGLVRNKDFIQLEIDGYNMGISADRFNEDTNYIGTTYGTTHDLTTDFEIIQRQEKYRNYCQLKTPYNIFHKSGLMSTETSKPTFHDYRDWVYSSAWYFQNYENLNLRKHTKTNWYFIPKDEGWDED

SEQ ID NO: 92 - protein, 892 aa, Artificial Sequence
  Synthetic polypeptide
MKLEINKFNYNDPIDGINVITMRPPRHSDKINKGKGPFKAFQVIKNIWIVPERYNFTNNTNDLNIPSEPIMEADAIYNPNYLNTPSEKDEFLQGVIKVLERIKSKPEGEKLLELISSSIPLPLVSNGALTLSDNETIAYQENNNIVSNLQANLVIYGPGPDIANNATYGLYSTPISNGEGTLSEVSFSPFYLKPFDESYGNYRSLVNIVNKFVKREFAPDPASTLMHELVHVTHNLYGISNRNFYYNFDTGKIETSRQQNSLIFEELLTFGGIDSKAISSLIIKKIIETAKNNYTTLISERLNTVTVENDLLKYIKNKIPVQGRLGNFKLDTAEFEKKLNTILFVLNESNLAQRFSILVAKHFLKERPIDPIYVNILDDNSYSTLEGFNISSQGSNDFQGQLLESSYFEKIESNALRAFIKICPRNGLLYNAIYRNSKNYLNNIDLEDKKTTSKTNVSYPCSLLNGCIEVENKDLFLISNKDSLNDINLSEEKIKPETTVFFKDKLPPQDITLSNYDFTEANSIPSISQQNILERNEELYEPIRNSLFEIKTIYVDKLTTFHFLEAQNIDESIDSSKIRVELTDSVDEALSNPNKVYSPFKNMSNTINSIETGITSTYIFYQWLRSIVKDFSDETGKIDVIDKSSDTLAIVPYIGPLLNIGNDIRHGDFVGAIELAGITALLEYVPEFTIPILVGLEVIGGELAREQVEAIVNNALDKRDQKWAEVYNITKAQWWGTIHLQINTRLAHTYKALSRQANAIKMNMEFQLANYKGNIDDKAKIKNAISETEILLNKSVEQAMKNTEKFMIKLSNSYLTKEMIPKVQDNLKNFDLETKKTLDKFIKEKEDILGTNLSSSLRRKVSIRLNKNIAFDINDIPFSEFDDLINQYKNEI

SEQ ID NO: 93 - protein, 892 aa, Artificial Sequence
  Synthetic polypeptide
MKLEINKFNYNDPIDGINVITMRPPRHSDKINKGKGPFKAFQVIKNIWIVPERYNFTNNTNDLNIPSEPIMEADAIYNPNYLNTPSEKDEFLQGVIKVLERIKSKPEGEKLLELISSSIPLPLVSNGALTLSDNETIAYQENNNIVSNLQANLVIYGPGPDIANNATYGLYSTPISNGEGTLSEVSFSPFYLKPFDESYGNYRSLVNIVNKFVKREFAPDPASTLMYELVHVTHNLYGISNRNFYYNFDTGKIETSRQQNSLIFEELLTFGGIDSKAISSLIIKKIIETAKNNYTTLISERLNTVTVENDLLKYIKNKIPVQGRLGNFKLDTAEFEKKLNTILFVLNESNLAQRFSILVRKHYLKERPIDPIYVNILDDNSYSTLEGFNISSQGSNDFQGQLLESSYFEKIESNALRAFIKICPRNGLLYNAIYRNSKNYLNNIDLEDKKTTSKTNVSYPCSLLNGCIEVENKDLFLISNKDSLNDINLSEEKIKPETTVFFKDKLPPQDITLSNYDFTEANSIPSISQQNILERNEELYEPIRNSLFEIKTIYVDKLTTFHFLEAQNIDESIDSSKIRVELTDSVDEALSNPNKVYSPFKNMSNTINSIETGITSTYIFYQWLRSIVKDFSDETGKIDVIDKSSDTLAIVPYIGPLLNIGNDIRHGDFVGAIELAGITALLEYVPEFTIPILVGLEVIGGELAREQVEAIVNNALDKRDQKWAEVYNITKAQWWGTIHLQINTRLAHTYKALSRQANAIKMNMEFQLANYKGNIDDKAKIKNAISETEILLNKSVEQAMKNTEKFMIKLSNSYLTKEMIPKVQDNLKNFDLETKKTLDKFIKEKEDILGTNLSSSLRRKVSIRLNKNIAFDINDIPFSEFDDLINQYKNEI

SEQ ID NO: 94 - protein, 892 aa, Artificial Sequence
  Synthetic polypeptide
MKLEINKFNYNDPIDGINVITMRPPRHSDKINKGKGPFKAFQVIKNIWIVPERYNFTNNTNDLNIPSEPIMEADAIYNPNYLNTPSEKDEFLQGVIKVLERIKSKPEGEKLLELISSSIPLPLVSNGALTLSDNETIAYQENNNIVSNLQANLVIYGPGPDIANNATYGLYSTPISNGEGTLSEVSFSPFYLKPFDESYGNYRSLVNIVNKFVKREFAPDPASTLMHQLVHVTHNLYGISNRNFYYNFDTGKIETSRQQNSLIFEELLTFGGIDSKAISSLIIKKIIETAKNNYTTLISERLNTVTVENDLLKYIKNKIPVQGRLGNFKLDTAEFEKKLNTILFVLNESNLAQRFSILVRKHYLKERPIDPIYVNILDDNSYSTLEGFNISSQGSNDFQGQLLESSYFEKIESNALRAFIKICPRNGLLYNAIYRNSKNYLNNIDLEDKKTTSKTNVSYPCSLLNGCIEVENKDLFLISNKDSLNDINLSEEKIKPETTVFFKDKLPPQDITLSNYDFTEANSIPSISQQNILERNEELYEPIRNSLFEIKTIYVDKLTTFHFLEAQNIDESIDSSKIRVELTDSVDEALSNPNKVYSPFKNMSNTINSIETGITSTYIFYQWLRSIVKDFSDETGKIDVIDKSSDTLAIVPYIGPLLNIGNDIRHGDFVGAIELAGITALLEYVPEFTIPILVGLEVIGGELAREQVEAIVNNALDKRDQKWAEVYNITKAQWWGTIHLQINTRLAHTYKALSRQANAIKMNMEFQLANYKGNIDDKAKIKNAISETEILLNKSVEQAMKNTEKFMIKLSNSYLTKEMIPKVQDNLKNFDLETKKTLDKFIKEKEDILGTNLSSSLRRKVSIRLNKNIAFDINDIPFSEFDDLINQYKNEI

SEQ ID NO: 95 - protein, 892 aa, Artificial Sequence
  Synthetic polypeptide
MKLEINKFNYNDPIDGINVITMRPPRHSDKINKGKGPFKAFQVIKNIWIVPERYNFTNNTNDLNIPSEPIMEADAIYNPNYLNTPSEKDEFLQGVIKVLERIKSKPEGEKLLELISSSIPLPLVSNGALTLSDNETIAYQENNNIVSNLQANLVIYGPGPDIANNATYGLYSTPISNGEGTLSEVSFSPFYLKPFDESYGNYRSLVNIVNKFVKREFAPDPASTLMHELVYVTHNLYGISNRNFYYNFDTGKIETSRQQNSLIFEELLTFGGIDSKAISSLIIKKIIETAKNNYTTLISERLNTVTVENDLLKYIKNKIPVQGRLGNFKLDTAEFEKKLNTILFVLNESNLAQRFSILVRKHYLKERPIDPIYVNILDDNSYSTLEGFNISSQGSNDFQGQLLESSYFEKIESNALRAFIKICPRNGLLYNAIYRNSKNYLNNIDLEDKKTTSKTNVSYPCSLLNGCIEVENKDLFLISNKDSLNDINLSEEKIKPETTVFFKDKLPPQDITLSNYDFTEANSIPSISQQNILERNEELYEPIRNSLFEIKTIYVDKLTTFHFLEAQNIDESIDSSKIRVELTDSVDEALSNPNKVYSPFKNMSNTINSIETGITSTYIFYQWLRSIVKDFSDETGKIDVIDKSSDTLAIVPYIGPLLNIGNDIRHGDFVGAIELAGITALLEYVPEFTIPILVGLEVIGGELAREQVEAIVNNALDKRDQKWAEVYNITKAQWWGTIHLQINTRLAHTYKALSRQANAIKMNMEFQLANYKGNIDDKAKIKNAISETEILLNKSVEQAMKNTEKFMIKLSNSYLTKEMIPKVQDNLKNFDLETKKTLDKFIKEKEDILGTNLSSSLRRKVSIRLNKNIAFDINDIPFSEFDDLINQYKNEI

SEQ ID NO: 96 - protein, 898 aa, Artificial Sequence
  Synthetic polypeptide
MKLEINKFNYNDPIDGINVITMRPPRHSDKINKGKGPFKAFQVIKNIWIVPERYNFTNNTNDLNIPSEPIMEADAIYNPNYLNTPSEKDEFLQGVIKVLERIKSKPEGEKLLELISSSIPLPLVSNGALTLSDNETIAYQENNNIVSNLQANLVIYGPGPDIANNATYGLYSTPISNGEGTLSEVSFSPFYLKPFDESYGNYRSLVNIVNKFVKREFAPDPASTLMHELVHVTHNLYGISNRNFYYNFDTGKIETSRQQNSLIFEELLTFGGIDSKAISSLIIKKIIETAKNNYTTLISERLNTVTVENDLLKYIKNKIPVQGRLGNFKLDTAEFEKKLNTILFVLNESNLAQRFSILVRKHYLKERPIDPIYVNILDDNSYSTLEGFNISSQGSNDFQGQLLESSYFEKIESNALRAFIKICPRNGLLYNAIYRNSKNYLNNIDLEDKKTTSKTNVSYPCSLLNGCIEVENKDLFLISNKDSLNDINLSEEKIKPETTVFFKDKLPPQDITLSNYDFTEANSIPSISQQNILERNEELYEPIRNSLFEIKTIYVDKLTTFHFLEAQNIDESIDSSKIRVELTDSVDEALSNPNKVYSPFKNMSNTINSIETGITSTYIFYQWLRSIVKDFSDETGKIDVIDKSSDTLAIVPYIGPLLNIGNDIRHGDFVGAIELAGITALLEYVPEFTIPILVGLEVIGGELAREQVEAIVNNALDKRDQKWAEVYNITKAQWWGTIHLQINTRLAHTYKALSRQANAIKMNMEFQLANYKGNIDDKAKIKNAISETEILLNKSVEQAMKNTEKFMIKLSNSYLTKEMIPKVQDNLKNFDLETKKTLDKFIKEKEDILGTNLSSSLRRKVSIRLNKNIAFDINDIPFSEFDDLINQYKNEILPETGG

SEQ ID NO: 97 - protein, 415 aa, Artificial Sequence
  Synthetic polypeptide
GEDYEVLNLGAEDGKIKDLSGTTSDINIGSDIELADGRENKAIKIKGSENSTIKIAMNKYLRFSATDNFSISFWIKHPKPTNLLNNGIEYTLVENFNQRGWKISIQDSKLIWYLRDHNNSIKIVTPDYIAFNGWNLITITNNRSKGSIVYVNGSKIEEKDISSIWNTEVDDPIIFRLKNNRDTQAFTLLDQFSIYRKELNQNEVVKLYNYYFNSNYIRDIWGNPLQYNKKYYLQTQDKPGKGLIREYWSSFGYDYVILSDSKTITFPNNIRYGALYNGSKVLIKNSKKLDGLVRNKDFIQLEIDGYNMGISADRFNEDTNYIGTTYGTTHDLTTDFEIIQRQEKYRNYCQLKTPYNIFHKSGLMSTETSKPTFHDYRDWVYSSAWYFQNYENLNLRKHTKTNWYFIPKDEGWDED

SEQ ID NO: 98 - protein, 424 aa, Artificial Sequence
  Synthetic polypeptide
IINTSILNLRYESNHLIDLSRYASKINIGSKVNFDPIDKNQIQLFNLESSKIEVILKNAIVYNSMYENFSTSFWIRIPKYFNSISLNNEYTIINCMENNSGWKVSLNYGEIIWTLQDTQEIKQRVVFKYSQMINISDYINRWIFVTITNNRLNNSKIYINGRLIDQKPISNLGNIHASNNIMFKLDGCRDTHRYIWIKYFNLFDKELNEKEIKDLYDNQSNSGILKDFWGDYLQYDKPYYMLNLYDPNKYVDVNNVGIRGYMYLKGPRGSVMTTNIYLNSSLYRGTKFIIKKYASGNKDNIVRNNDRVYINVVVKNKEYRLATNASQAGVEKILSALEIPDVGNLSQVVVMKSKNDQGITNKCKMNLQDNNGNDIGFIGFHQFNNIAKLVASNWYNRQIERSSRTLGCSWEFIPVDDGWGERPL

SEQ ID NO: 99 - protein, 432 aa, Artificial Sequence; identical to SEQ ID NO: 9
  Synthetic polypeptide

SEQ ID NO: 100 - protein, 424 aa, Artificial Sequence
  Synthetic polypeptide
INDSKILSLQNRKNTLVDTSGYNAEVSEEGDVQLNPIFPFDFKLGSSGEDRGKVIVTQNENIVYNSMYESFSISFWIRINKWVSNLPGYTIIDSVKNNSGWSIGIISNFLVFTLKQNEDSEQSINFSYDISNNAPGYNKWFFVTVTNNMMGNMKIYINGKLIDTIKVKELTGINFSKTITFEINKIPDTGLITSDSDNINMWIRDFYIFAKELDGKDINILFNSLQYTNVVKDYWGNDLRYNKEYYMVNIDYLNRYMYANSRQIVFNTRRNNNDFNEGYKIIIKRIRGNTNDTRVRGGDILYFDMTINNKAYNLFMKNETMYADNHSTEDIYAIGLREQTKDINDNIIFQIQPMNNTYYYASQIFKSNFNGENISGICSIGTYRFRLGGDWYRHNYLVPTVKQGNYASLLESTSTHWGFVPVSE

SEQ ID NO: 101 - protein, 866 aa, Artificial Sequence
  Synthetic polypeptide
MVTINDLHYSDPIDEDNIINMRIPLYDLEVDDQFINHNVPDLKAFQVFPNVWVVPERYTFYSTMKNLDAPANPSRSSYYDPTYLQSDAEKEVFLQQMILLFKRINSTQEGQQFLNLLSRSIPVPYESNGDVAMGTTQVIKQMDDKGNVLKHRRAHIIIYGPGPDLMAKGSKALTKSRETGRGCMAEIYFSPMYHKTYSTKLTNKNSLVDKSVQEFVPDPAVTLIHELCHGLHALYGIDLGNVGSWEFNSNPNSLFSSWFSSKEAVNFEEVMTFGGEDVKVIKSEIDKKIPGILNLIKTTVEPIINKITDPHDEMLQCLQSKYPSLKGTLGQFFFDDTQLEKDIRDLWMVMNETMFAENLKALTRARYLVPKVENIVQVDILSPNVYTIDKGFNHLSKGFKGQSVSQSYFRKISALARGAVVRACPNPHFSSQLVPRGSLSSCIEILEDDLFIMSSKDSFTDTDFSEPSVGPVSYKAKKGADTILDSTLSNYDFSKEINFTSTVPIITVEDPLETDEDVPVISEDRTVYVDDYTTFHFLEAQKIGKEVVPTQTKVVFTTNMEEALFDSKKVYTVFENTASRINEAGTGIANGMMFYQWLKGIVQDFTEEATQKDTFDKISDVTMIVPYLGNILNIGNDIRKGDFMGAVELGGVTILLEAIPELTLPVLIGLTIIEDELEKEQVSQTVYNVLDKRDEKWEEVYGFVKQQWWWMVHTQFETRILHAYQALNHQVEAIKANMTYQLANYRGNQEDKELLEKAIDDTLQSLYYAVDQAMHNIKRFLIQSSKSYLLNQMLPKTKEQLLAFDQQTLRNVNDFINKNQGVLGESLAKDLKKKVEKRLTSLPVFNLEDLPISEFEDLIHSHEIDI

SEQ ID NO: 102 - protein, 872 aa, Artificial Sequence
  Synthetic polypeptide
MVTINDLHYSDPIDEDNIINMRIPLYDLEVDDQFINHNVPDLKAFQVFPNVWVVPERYTFYSTMKNLDAPANPSRSSYYDPTYLQSDAEKEVFLQQMILLFKRINSTQEGQQFLNLLSRSIPVPYESNGDVAMGTTQVIKQMDDKGNVLKHRRAHIIIYGPGPDLMAKGSKALTKSRETGRGCMAEIYFSPMYHKTYSTKLTNKNSLVDKSVQEFVPDPAVTLIHELCHGLHALYGIDLGNVGSWEFNSNPNSLFSSWFSSKEAVNFEEVMTFGGEDVKVIKSEIDKKIPGILNLIKTTVEPIINKITDPHDEMLQCLQSKYPSLKGTLGQFFFDDTQLEKDIRDLWMVMNETMFAENLKALTRARYLVPKVENIVQVDILSPNVYTIDKGFNHLSKGFKGQSVSQSYFRKISALARGAVVRACVRGIITSKTKSLDKGYNKALNDLCIEILEDDLFIMSSKDSFTDTDFSEPSVGPVSYKAKKGADTILDSTLSNYDFSKEINFTSTVPIITVEDPLETDEDVPVISEDRTVYVDDYTTFHFLEAQKIGKEVVPTQTKVVFTTNMEEALFDSKKVYTVFENTASRINEAGTGIANGMMFYQWLKGIVQDFTEEATQKDTFDKISDVTMIVPYLGNILNIGNDIRKGDFMGAVELGGVTILLEAIPELTLPVLIGLTIIEDELEKEQVSQTVYNVLDKRDEKWEEVYGFVKQQWWWMVHTQFETRILHAYQALNHQVEAIKANMTYQLANYRGNQEDKELLEKAIDDTLQSLYYAVDQAMHNIKRFLIQSSKSYLLNQMLPKTKEQLLAFDQQTLRNVNDFINKNQGVLGESLAKDLKKKVEKRLTSLPVFNLEDLPISEFEDLIHSHEIDI

SEQ ID NO: 103 - protein, 857 aa, Artificial Sequence
  Synthetic polypeptide
MVTINDLHYSDPIDEDNIINMRIPLYDLEVDDQFINHNVPDLKAFQVFPNVWVVPERYTFYSTMKNLDAPANPSRSSYYDPTYLQSDAEKEVFLQQMILLFKRINSTQEGQQFLNLLSRSIPVPYESNGDVAMGTTQVIKQMDDKGNVLKHRRAHIIIYGPGPDLMAKGSKALTKSRETGRGCMAEIYFSPMYHKTYSTKLTNKNSLVDKSVQEFVPDPAVTLIHELCHGLHALYGIDLGNVGSWEFNSNPNSLFSSWFSSKEAVNFEEVMTFGGEDVKVIKSEIDKKIPGILNLIKTTVEPIINKITDPHDEMLQCLQSKYPSLKGTLGQFFFDDTQLEKDIRDLWMVMNETMFAENLKALTRARYLVPKVENIVQVDILSPNVYTIDKGFNHLSKGFKGQSVSQSYFRKISALARGAVVRACKSVKAPGICIEILEDDLFIMSSKDSFTDTDFSEPSVGPVSYKAKKGADTILDSTLSNYDFSKEINFTSTVPIITVEDPLETDEDVPVISEDRTVYVDDYTTFHFLEAQKIGKEVVPTQTKVVFTTNMEEALFDSKKVYTVFENTASRINEAGTGIANGMMFYQWLKGIVQDFTEEATQKDTFDKISDVTMIVPYLGNILNIGNDIRKGDFMGAVELGGVTILLEAIPELTLPVLIGLTIIEDELEKEQVSQTVYNVLDKRDEKWEEVYGFVKQQWWWMVHTQFETRILHAYQALNHQVEAIKANMTYQLANYRGNQEDKELLEKAIDDTLQSLYYAVDQAMHNIKRFLIQSSKSYLLNQMLPKTKEQLLAFDQQTLRNVNDFINKNQGVLGESLAKDLKKKVEKRLTSLPVFNLEDLPISEFEDLIHSHEIDI

SEQ ID NO: 104 - protein, 864 aa, Artificial Sequence
  Synthetic polypeptide
MVTINDLHYSDPIDEDNIINMRIPLYDLEVDDQFINHNVPDLKAFQVFPNVWVVPERYTFYSTMKNLDAPANPSRSSYYDPTYLQSDAEKEVFLQQMILLFKRINSTQEGQQFLNLLSRSIPVPYESNGDVAMGTTQVIKQMDDKGNVLKHRRAHIIIYGPGPDLMAKGSKALTKSRETGRGCMAEIYFSPMYHKTYSTKLTNKNSLVDKSVQEFVPDPAVTLIHELCHGLHALYGIDLGNVGSWEFNSNPNSLFSSWFSSKEAVNFEEVMTFGGEDVKVIKSEIDKKIPGILNLIKTTVEPIINKITDPHDEMLQCLQSKYPSLKGTLGQFFFDDTQLEKDIRDLWMVMNETMFAENLKALTRARYLVPKVENIVQVDILSPNVYTIDKGFNHLSKGFKGQSVSQSYFRKISALARGAVVRACHKAIDGRSLYNKTLDCIEILEDDLFIMSSKDSFTDTDFSEPSVGPVSYKAKKGADTILDSTLSNYDFSKEINFTSTVPIITVEDPLETDEDVPVISEDRTVYVDDYTTFHFLEAQKIGKEVVPTQTKVVFTTNMEEALFDSKKVYTVFENTASRINEAGTGIANGMMFYQWLKGIVQDFTEEATQKDTFDKISDVTMIVPYLGNILNIGNDIRKGDFMGAVELGGVTILLEAIPELTLPVLIGLTIIEDELEKEQVSQTVYNVLDKRDEKWEEVYGFVKQQWWWMVHTQFETRILHAYQALNHQVEAIKANMTYQLANYRGNQEDKELLEKAIDDTLQSLYYAVDQAMHNIKRFLIQSSKSYLLNQMLPKTKEQLLAFDQQTLRNVNDFINKNQGVLGESLAKDLKKKVEKRLTSLPVFNLEDLPISEFEDLIHSHEIDI

SEQ ID NO: 105 - protein, 861 aa, Artificial Sequence
  Synthetic polypeptide
MVTINDLHYSDPIDEDNIINMRIPLYDLEVDDQFINHNVPDLKAFQVFPNVWVVPERYTFYSTMKNLDAPANPSRSSYYDPTYLQSDAEKEVFLQQMILLFKRINSTQEGQQFLNLLSRSIPVPYESNGDVAMGTTQVIKQMDDKGNVLKHRRAHIIIYGPGPDLMAKGSKALTKSRETGRGCMAEIYFSPMYHKTYSTKLTNKNSLVDKSVQEFVPDPAVTLIHELCHGLHALYGIDLGNVGSWEFNSNPNSLFSSWFSSKEAVNFEEVMTFGGEDVKVIKSEIDKKIPGILNLIKTTVEPIINKITDPHDEMLQCLQSKYPSLKGTLGQFFFDDTQLEKDIRDLWMVMNETMFAENLKALTRARYLVPKVENIVQVDILSPNVYTIDKGFNHLSKGFKGQSVSQSYFRKISALARGAVVRACLRLTKNSRDDSTCIEILEDDLFIMSSKDSFTDTDFSEPSVGPVSYKAKKGADTILDSTLSNYDFSKEINFTSTVPIITVEDPLETDEDVPVISEDRTVYVDDYTTFHFLEAQKIGKEVVPTQTKVVFTTNMEEALFDSKKVYTVFENTASRINEAGTGIANGMMFYQWLKGIVQDFTEEATQKDTFDKISDVTMIVPYLGNILNIGNDIRKGDFMGAVELGGVTILLEAIPELTLPVLIGLTIIEDELEKEQVSQTVYNVLDKRDEKWEEVYGFVKQQWWWMVHTQFETRILHAYQALNHQVEAIKANMTYQLANYRGNQEDKELLEKAIDDTLQSLYYAVDQAMHNIKRFLIQSSKSYLLNQMLPKTKEQLLAFDQQTLRNVNDFINKNQGVLGESLAKDLKKKVEKRLTSLPVFNLEDLPISEFEDLIHSHEIDI

SEQ ID NO: 106 - protein, 862 aa, Artificial Sequence
  Synthetic polypeptide
MVTINDLHYSDPIDEDNIINMRIPLYDLEVDDQFINHNVPDLKAFQVFPNVWVVPERYTFYSTMKNLDAPANPSRSSYYDPTYLQSDAEKEVFLQQMILLFKRINSTQEGQQFLNLLSRSIPVPYESNGDVAMGTTQVIKQMDDKGNVLKHRRAHIIIYGPGPDLMAKGSKALTKSRETGRGCMAEIYFSPMYHKTYSTKLTNKNSLVDKSVQEFVPDPAVTLIHELCHGLHALYGIDLGNVGSWEFNSNPNSLFSSWFSSKEAVNFEEVMTFGGEDVKVIKSEIDKKIPGILNLIKTTVEPIINKITDPHDEMLQCLQSKYPSLKGTLGQFFFDDTQLEKDIRDLWMVMNETMFAENLKALTRARYLVPKVENIVQVDILSPNVYTIDKGFNHLSKGFKGQSVSQSYFRKISALARGAVVRACKNIVSVKGIRKSICIEILEDDLFIMSSKDSFTDTDFSEPSVGPVSYKAKKGADTILDSTLSNYDFSKEINFTSTVPIITVEDPLETDEDVPVISEDRTVYVDDYTTFHFLEAQKIGKEVVPTQTKVVFTTNMEEALFDSKKVYTVFENTASRINEAGTGIANGMMFYQWLKGIVQDFTEEATQKDTFDKISDVTMIVPYLGNILNIGNDIRKGDFMGAVELGGVTILLEAIPELTLPVLIGLTIIEDELEKEQVSQTVYNVLDKRDEKWEEVYGFVKQQWWWMVHTQFETRILHAYQALNHQVEAIKANMTYQLANYRGNQEDKELLEKAIDDTLQSLYYAVDQAMHNIKRFLIQSSKSYLLNQMLPKTKEQLLAFDQQTLRNVNDFINKNQGVLGESLAKDLKKKVEKRLTSLPVFNLEDLPISEFEDLIHSHEIDI

SEQ ID NO: 107 - protein, 864 aa, Artificial Sequence
  Synthetic polypeptide
MVTINDLHYSDPIDEDNIINMRIPLYDLEVDDQFINHNVPDLKAFQVFPNVWVVPERYTFYSTMKNLDAPANPSRSSYYDPTYLQSDAEKEVFLQQMILLFKRINSTQEGQQFLNLLSRSIPVPYESNGDVAMGTTQVIKQMDDKGNVLKHRRAHIIIYGPGPDLMAKGSKALTKSRETGRGCMAEIYFSPMYHKTYSTKLTNKNSLVDKSVQEFVPDPAVTLIHELCHGLHALYGIDLGNVGSWEFNSNPNSLFSSWFSSKEAVNFEEVMTFGGEDVKVIKSEIDKKIPGILNLIKTTVEPIINKITDPHDEMLQCLQSKYPSLKGTLGQFFFDDTQLEKDIRDLWMVMNETMFAENLKALTRARYLVPKVENIVQVDILSPNVYTIDKGFNHLSKGFKGQSVSQSYFRKISALARGAVVRACKSVIPRKGTKAPPRLCIEILEDDLFIMSSKDSFTDTDFSEPSVGPVSYKAKKGADTILDSTLSNYDFSKEINFTSTVPIITVEDPLETDEDVPVISEDRTVYVDDYTTFHFLEAQKIGKEVVPTQTKVVFTTNMEEALFDSKKVYTVFENTASRINEAGTGIANGMMFYQWLKGIVQDFTEEATQKDTFDKISDVTMIVPYLGNILNIGNDIRKGDFMGAVELGGVTILLEAIPELTLPVLIGLTIIEDELEKEQVSQTVYNVLDKRDEKWEEVYGFVKQQWWWMVHTQFETRILHAYQALNHQVEAIKANMTYQLANYRGNQEDKELLEKAIDDTLQSLYYAVDQAMHNIKRFLIQSSKSYLLNQMLPKTKEQLLAFDQQTLRNVNDFINKNQGVLGESLAKDLKKKVEKRLTSLPVFNLEDLPISEFEDLIHSHEIDI

SEQ ID NO: 108 - protein, 862 aa, Artificial Sequence
  Synthetic polypeptide
MVTINDLHYSDPIDEDNIINMRIPLYDLEVDDQFINHNVPDLKAFQVFPNVWVVPERYTFYSTMKNLDAPANPSRSSYYDPTYLQSDAEKEVFLQQMILLFKRINSTQEGQQFLNLLSRSIPVPYESNGDVAMGTTQVIKQMDDKGNVLKHRRAHIIIYGPGPDLMAKGSKALTKSRETGRGCMAEIYFSPMYHKTYSTKLTNKNSLVDKSVQEFVPDPAVTLIHELCHGLHALYGIDLGNVGSWEFNSNPNSLFSSWFSSKEAVNFEEVMTFGGEDVKVIKSEIDKKIPGILNLIKTTVEPIINKITDPHDEMLQCLQSKYPSLKGTLGQFFFDDTQLEKDIRDLWMVMNETMFAENLKALTRARYLVPKVENIVQVDILSPNVYTIDKGFNHLSKGFKGQSVSQSYFRKISALARGAVVRACKPVMYKNTGKSEQCIEILEDDLFIMSSKDSFTDTDFSEPSVGPVSYKAKKGADTILDSTLSNYDFSKEINFTSTVPIITVEDPLETDEDVPVISEDRTVYVDDYTTFHFLEAQKIGKEVVPTQTKVVFTTNMEEALFDSKKVYTVFENTASRINEAGTGIANGMMFYQWLKGIVQDFTEEATQKDTFDKISDVTMIVPYLGNILNIGNDIRKGDFMGAVELGGVTILLEAIPELTLPVLIGLTIIEDELEKEQVSQTVYNVLDKRDEKWEEVYGFVKQQWWWMVHTQFETRILHAYQALNHQVEAIKANMTYQLANYRGNQEDKELLEKAIDDTLQSLYYAVDQAMHNIKRFLIQSSKSYLLNQMLPKTKEQLLAFDQQTLRNVNDFINKNQGVLGESLAKDLKKKVEKRLTSLPVFNLEDLPISEFEDLIHSHEIDI

SEQ ID NO: 109 - protein, 892 aa, Artificial Sequence
  Synthetic polypeptide
MVTINDLHYSDPIDEDNIINMRIPLYDLEVDDQFINHNVPDLKAFQVFPNVWVVPERYTFYSTMKNLDAPANPSRSSYYDPTYLQSDAEKEVFLQQMILLFKRINSTQEGQQFLNLLSRSIPVPYESNGDVAMGTTQVIKQMDDKGNVLKHRRAHIIIYGPGPDLMAKGSKALTKSRETGRGCMAEIYFSPMYHKTYSTKLTNKNSLVDKSVQEFVPDPAVTLIHELCHGLHALYGIDLGNVGSWEFNSNPNSLFSSWFSSKEAVNFEEVMTFGGEDVKVIKSEIDKKIPGILNLIKTTVEPIINKITDPHDEMLQCLQSKYPSLKGTLGQFFFDDTQLEKDIRDLWMVMNETMFAENLKALTRARYLVPKVENIVQVDILSPNVYTIDKGFNHLSKGFKGQSVSQSYFRKISALARGAVVRACPRNGLLYNAIYRNSKNYLNNIDLEDKKTTSKTNVSYPCSLLNGCIEILEDDLFIMSSKDSFTDTDFSEPSVGPVSYKAKKGADTILDSTLSNYDFSKEINFTSTVPIITVEDPLETDEDVPVISEDRTVYVDDYTTFHFLEAQKIGKEVVPTQTKVVFTTNMEEALFDSKKVYTVFENTASRINEAGTGIANGMMFYQWLKGIVQDFTEEATQKDTFDKISDVTMIVPYLGNILNIGNDIRKGDFMGAVELGGVTILLEAIPELTLPVLIGLTIIEDELEKEQVSQTVYNVLDKRDEKWEEVYGFVKQQWWWMVHTQFETRILHAYQALNHQVEAIKANMTYQLANYRGNQEDKELLEKAIDDTLQSLYYAVDQAMHNIKRFLIQSSKSYLLNQMLPKTKEQLLAFDQQTLRNVNDFINKNQGVLGESLAKDLKKKVEKRLTSLPVFNLEDLPISEFEDLIHSHEIDI

SEQ ID NO: 110 - protein, 1283 aa, Artificial Sequence
  Synthetic polypeptide
MVTINDLHYSDPIDEDNIINMRIPLYDLEVDDQFINHNVPDLKAFQVFPNVWVVPERYTFYSTMKNLDAPANPSRSSYYDPTYLQSDAEKEVFLQQMILLFKRINSTQEGQQFLNLLSRSIPVPYESNGDVAMGTTQVIKQMDDKGNVLKHRRAHIIIYGPGPDLMAKGSKALTKSRETGRGCMAEIYFSPMYHKTYSTKLTNKNSLVDKSVQEFVPDPAVTLIHELCHGLHALYGIDLGNVGSWEFNSNPNSLFSSWFSSKEAVNFEEVMTFGGEDVKVIKSEIDKKIPGILNLIKTTVEPIINKITDPHDEMLQCLQSKYPSLKGTLGQFFFDDTQLEKDIRDLWMVMNETMFAENLKALTRARYLVPKVENIVQVDILSPNVYTIDKGFNHLSKGFKGQSVSQSYFRKISALARGAVVRACPNPHFSSQLVPRGSLSSCIEILEDDLFIMSSKDSFTDTDFSEPSVGPVSYKAKKGADTILDSTLSNYDFSKEINFTSTVPIITVEDPLETDEDVPVISEDRTVYVDDYTTFHFLEAQKIGKEVVPTQTKVVFTTNMEEALFDSKKVYTVFENTASRINEAGTGIANGMMFYQWLKGIVQDFTEEATQKDTFDKISDVTMIVPYLGNILNIGNDIRKGDFMGAVELGGVTILLEAIPELTLPVLIGLTIIEDELEKEQVSQTVYNVLDKRDEKWEEVYGFVKQQWWWMVHTQFETRILHAYQALNHQVEAIKANMTYQLANYRGNQEDKELLEKAIDDTLQSLYYAVDQAMHNIKRFLIQSSKSYLLNQMLPKTKEQLLAFDQQTLRNVNDFINKNQGVLGESLAKDLKKKVEKRLTSLPVFNLEDLPISEFEDLIHSHEIDIQDSEVLNIGVNNGKIQDLSGENTPLTLGENLHIVNGRDNQAVRLNNQLDSKLEIQSRPNIHFTAFEDFSISIWIRCSMLRNNRNRGQKYTIIQQFNKYGWQLAIQDSVFVWTLHDTFNNQIQLTSGSALTNKNYLLQNFWLHITVTNKRSEKSRLYINGVLQDQKDISVLGNCHPKEPILFSIQDNSDPNYFVRFEQFNVYRKALTDSEVNRLYWKYFEGSYLRDVWGERLTYNRDYYMQLSTLPGRGIKREYRTWSGFDYIILSELGTQKIPTHEVTYPKLYQGQKITIHSDGKNLEPHVKSNKNIRLKIDDFYIGVVNPFKLPEWRPESGAYVVTTYNHAEDLCLYFRTRSSSQSLYYGQLIMNDGRNKSLLNYTLKGSTYWIWSSAWYYENYNTSSKTAGNWYFIPVDEGWKED

SEQ ID NO: 111 - protein, 1289 aa, Artificial Sequence
  Synthetic polypeptide
MVTINDLHYSDPIDEDNIINMRIPLYDLEVDDQFINHNVPDLKAFQVFPNVWVVPERYTFYSTMKNLDAPANPSRSSYYDPTYLQSDAEKEVFLQQMILLFKRINSTQEGQQFLNLLSRSIPVPYESNGDVAMGTTQVIKQMDDKGNVLKHRRAHIIIYGPGPDLMAKGSKALTKSRETGRGCMAEIYFSPMYHKTYSTKLTNKNSLVDKSVQEFVPDPAVTLIHELCHGLHALYGIDLGNVGSWEFNSNPNSLFSSWFSSKEAVNFEEVMTFGGEDVKVIKSEIDKKIPGILNLIKTTVEPIINKITDPHDEMLQCLQSKYPSLKGTLGQFFFDDTQLEKDIRDLWMVMNETMFAENLKALTRARYLVPKVENIVQVDILSPNVYTIDKGFNHLSKGFKGQSVSQSYFRKISALARGAVVRACVRGIITSKTKSLDKGYNKALNDLCIEILEDDLFIMSSKDSFTDTDFSEPSVGPVSYKAKKGADTILDSTLSNYDFSKEINFTSTVPIITVEDPLETDEDVPVISEDRTVYVDDYTTFHFLEAQKIGKEVVPTQTKVVFTTNMEEALFDSKKVYTVFENTASRINEAGTGIANGMMFYQWLKGIVQDFTEEATQKDTFDKISDVTMIVPYLGNILNIGNDIRKGDFMGAVELGGVTILLEAIPELTLPVLIGLTIIEDELEKEQVSQTVYNVLDKRDEKWEEVYGFVKQQWWWMVHTQFETRILHAYQALNHQVEAIKANMTYQLANYRGNQEDKELLEKAIDDTLQSLYYAVDQAMHNIKRFLIQSSKSYLLNQMLPKTKEQLLAFDQQTLRNVNDFINKNQGVLGESLAKDLKKKVEKRLTSLPVFNLEDLPISEFEDLIHSHEIDIQDSEVLNIGVNNGKIQDLSGENTPLTLGENLHIVNGRDNQAVRLNNQLDSKLEIQSRPNIHFTAFEDFSISIWIRCSMLRNNRNRGQKYTIIQQFNKYGWQLAIQDSVFVWTLHDTFNNQIQLTSGSALTNKNYLLQNFWLHITVTNKRSEKSRLYINGVLQDQKDISVLGNCHPKEPILFSIQDNSDPNYFVRFEQFNVYRKALTDSEVNRLYWKYFEGSYLRDVWGERLTYNRDYYMQLSTLPGRGIKREYRTWSGFDYIILSELGTQKIPTHEVTYPKLYQGQKITIHSDGKNLEPHVKSNKNIRLKIDDFYIGVVNPFKLPEWRPESGAYVVTTYNHAEDLCLYFRTRSSSQSLYYGQLIMNDGRNKSLLNYTLKGSTYWIWSSAWYYENYNTSSKTAGNWYFIPVDEGWKED

SEQ ID NO: 112 - protein, 1274 aa, Artificial Sequence
  Synthetic polypeptide
MVTINDLHYSDPIDEDNIINMRIPLYDLEVDDQFINHNVPDLKAFQVFPNVWVVPERYTFYSTMKNLDAPANPSRSSYYDPTYLQSDAEKEVFLQQMILLFKRINSTQEGQQFLNLLSRSIPVPYESNGDVAMGTTQVIKQMDDKGNVLKHRRAHIIIYGPGPDLMAKGSKALTKSRETGRGCMAEIYFSPMYHKTYSTKLTNKNSLVDKSVQEFVPDPAVTLIHELCHGLHALYGIDLGNVGSWEFNSNPNSLFSSWFSSKEAVNFEEVMTFGGEDVKVIKSEIDKKIPGILNLIKTTVEPIINKITDPHDEMLQCLQSKYPSLKGTLGQFFFDDTQLEKDIRDLWMVMNETMFAENLKALTRARYLVPKVENIVQVDILSPNVYTIDKGFNHLSKGFKGQSVSQSYFRKISALARGAVVRACKSVKAPGICIEILEDDLFIMSSKDSFTDTDFSEPSVGPVSYKAKKGADTILDSTLSNYDFSKEINFTSTVPIITVEDPLETDEDVPVISEDRTVYVDDYTTFHFLEAQKIGKEVVPTQTKVVFTTNMEEALFDSKKVYTVFENTASRINEAGTGIANGMMFYQWLKGIVQDFTEEATQKDTFDKISDVTMIVPYLGNILNIGNDIRKGDFMGAVELGGVTILLEAIPELTLPVLIGLTIIEDELEKEQVSQTVYNVLDKRDEKWEEVYGFVKQQWWWMVHTQFETRILHAYQALNHQVEAIKANMTYQLANYRGNQEDKELLEKAIDDTLQSLYYAVDQAMHNIKRFLIQSSKSYLLNQMLPKTKEQLLAFDQQTLRNVNDFINKNQGVLGESLAKDLKKKVEKRLTSLPVFNLEDLPISEFEDLIHSHEIDIQDSEVLNIGVNNGKIQDLSGENTPLTLGENLHIVNGRDNQAVRLNNQLDSKLEIQSRPNIHFTAFEDFSISIWIRCSMLRNNRNRGQKYTIIQQFNKYGWQLAIQDSVFVWTLHDTFNNQIQLTSGSALTNKNYLLQNFWLHITVTNKRSEKSRLYINGVLQDQKDISVLGNCHPKEPILFSIQDNSDPNYFVRFEQFNVYRKALTDSEVNRLYWKYFEGSYLRDVWGERLTYNRDYYMQLSTLPGRGIKREYRTWSGFDYIILSELGTQKIPTHEVTYPKLYQGQKITIHSDGKNLEPHVKSNKNIRLKIDDFYIGVVNPFKLPEWRPESGAYVVTTYNHAEDLCLYFRTRSSSQSLYYGQLIMNDGRNKSLLNYTLKGSTYWIWSSAWYYENYNTSSKTAGNWYFIPVDEGWKED

SEQ ID NO: 113 - protein, 1281 aa, Artificial Sequence
  Synthetic polypeptide
MVTINDLHYSDPIDEDNIINMRIPLYDLEVDDQFINHNVPDLKAFQVFPNVWVVPERYTFYSTMKNLDAPANPSRSSYYDPTYLQSDAEKEVFLQQMILLFKRINSTQEGQQFLNLLSRSIPVPYESNGDVAMGTTQVIKQMDDKGNVLKHRRAHIIIYGPGPDLMAKGSKALTKSRETGRGCMAEIYFSPMYHKTYSTKLTNKNSLVDKSVQEFVPDPAVTLIHELCHGLHALYGIDLGNVGSWEFNSNPNSLFSSWFSSKEAVNFEEVMTFGGEDVKVIKSEIDKKIPGILNLIKTTVEPIINKITDPHDEMLQCLQSKYPSLKGTLGQFFFDDTQLEKDIRDLWMVMNETMFAENLKALTRARYLVPKVENIVQVDILSPNVYTIDKGFNHLSKGFKGQSVSQSYFRKISALARGAVVRACHKAIDGRSLYNKTLDCIEILEDDLFIMSSKDSFTDTDFSEPSVGPVSYKAKKGADTILDSTLSNYDFSKEINFTSTVPIITVEDPLETDEDVPVISEDRTVYVDDYTTFHFLEAQKIGKEVVPTQTKVVFTTNMEEALFDSKKVYTVFENTASRINEAGTGIANGMMFYQWLKGIVQDFTEEATQKDTFDKISDVTMIVPYLGNILNIGNDIRKGDFMGAVELGGVTILLEAIPELTLPVLIGLTIIEDELEKEQVSQTVYNVLDKRDEKWEEVYGFVKQQWWWMVHTQFETRILHAYQALNHQVEAIKANMTYQLANYRGNQEDKELLEKAIDDTLQSLYYAVDQAMHNIKRFLIQSSKSYLLNQMLPKTKEQLLAFDQQTLRNVNDFINKNQGVLGESLAKDLKKKVEKRLTSLPVFNLEDLPISEFEDLIHSHEIDIQDSEVLNIGVNNGKIQDLSGENTPLTLGENLHIVNGRDNQAVRLNNQLDSKLEIQSRPNIHFTAFEDFSISIWIRCSMLRNNRNRGQKYTIIQQFNKYGWQLAIQDSVFVWTLHDTFNNQIQLTSGSALTNKNYLLQNFWLHITVTNKRSEKSRLYINGVLQDQKDISVLGNCHPKEPILFSIQDNSDPNYFVRFEQFNVYRKALTDSEVNRLYWKYFEGSYLRDVWGERLTYNRDYYMQLSTLPGRGIKREYRTWSGFDYIILSELGTQKIPTHEVTYPKLYQGQKITIHSDGKNLEPHVKSNKNIRLKIDDFYIGVVNPFKLPEWRPESGAYVVTTYNHAEDLCLYFRTRSSSQSLYYGQLIMNDGRNKSLLNYTLKGSTYWIWSSAWYYENYNTSSKTAGNWYFIPVDEGWKED

SEQ ID NO: 114 - protein, 1278 aa, Artificial Sequence
  Synthetic polypeptide
MVTINDLHYSDPIDEDNIINMRIPLYDLEVDDQFINHNVPDLKAFQVFPNVWVVPERYTFYSTMKNLDAPANPSRSSYYDPTYLQSDAEKEVFLQQMILLFKRINSTQEGQQFLNLLSRSIPVPYESNGDVAMGTTQVIKQMDDKGNVLKHRRAHIIIYGPGPDLMAKGSKALTKSRETGRGCMAEIYFSPMYHKTYSTKLTNKNSLVDKSVQEFVPDPAVTLIHELCHGLHALYGIDLGNVGSWEFNSNPNSLFSSWFSSKEAVNFEEVMTFGGEDVKVIKSEIDKKIPGILNLIKTTVEPIINKITDPHDEMLQCLQSKYPSLKGTLGQFFFDDTQLEKDIRDLWMVMNETMFAENLKALTRARYLVPKVENIVQVDILSPNVYTIDKGFNHLSKGFKGQSVSQSYFRKISALARGAVVRACLRLTKNSRDDSTCIEILEDDLFIMSSKDSFTDTDFSEPSVGPVSYKAKKGADTILDSTLSNYDFSKEINFTSTVPIITVEDPLETDEDVPVISEDRTVYVDDYTTFHFLEAQKIGKEVVPTQTKVVFTTNMEEALFDSKKVYTVFENTASRINEAGTGIANGMMFYQWLKGIVQDFTEEATQKDTFDKISDVTMIVPYLGNILNIGNDIRKGDFMGAVELGGVTILLEAIPELTLPVLIGLTIIEDELEKEQVSQTVYNVLDKRDEKWEEVYGFVKQQWWWMVHTQFETRILHAYQALNHQVEAIKANMTYQLANYRGNQEDKELLEKAIDDTLQSLYYAVDQAMHNIKRFLIQSSKSYLLNQMLPKTKEQLLAFDQQTLRNVNDFINKNQGVLGESLAKDLKKKVEKRLTSLPVFNLEDLPISEFEDLIHSHEIDIQDSEVLNIGVNNGKIQDLSGENTPLTLGENLHIVNGRDNQAVRLNNQLDSKLEIQSRPNIHFTAFEDFSISIWIRCSMLRNNRNRGQKYTIIQQFNKYGWQLAIQDSVFVWTLHDTFNNQIQLTSGSALTNKNYLLQNFWLHITVTNKRSEKSRLYINGVLQDQKDISVLGNCHPKEPILFSIQDNSDPNYFVRFEQFNVYRKALTDSEVNRLYWKYFEGSYLRDVWGERLTYNRDYYMQLSTLPGRGIKREYRTWSGFDYIILSELGTQKIPTHEVTYPKLYQGQKITIHSDGKNLEPHVKSNKNIRLKIDDFYIGVVNPFKLPEWRPESGAYVVTTYNHAEDLCLYFRTRSSSQSLYYGQLIMNDGRNKSLLNYTLKGSTYWIWSSAWYYENYNTSSKTAGNWYFIPVDEGWKED

SEQ ID NO: 115 - protein, 1279 aa, Artificial Sequence
  Synthetic polypeptide
MVTINDLHYSDPIDEDNIINMRIPLYDLEVDDQFINHNVPDLKAFQVFPNVWVVPERYTFYSTMKNLDAPANPSRSSYYDPTYLQSDAEKEVFLQQMILLFKRINSTQEGQQFLNLLSRSIPVPYESNGDVAMGTTQVIKQMDDKGNVLKHRRAHIIIYGPGPDLMAKGSKALTKSRETGRGCMAEIYFSPMYHKTYSTKLTNKNSLVDKSVQEFVPDPAVTLIHELCHGLHALYGIDLGNVGSWEFNSNPNSLFSSWFSSKEAVNFEEVMTFGGEDVKVIKSEIDKKIPGILNLIKTTVEPIINKITDPHDEMLQCLQSKYPSLKGTLGQFFFDDTQLEKDIRDLWMVMNETMFAENLKALTRARYLVPKVENIVQVDILSPNVYTIDKGFNHLSKGFKGQSVSQSYFRKISALARGAVVRACKNIVSVKGIRKSICIEILEDDLFIMSSKDSFTDTDFSEPSVGPVSYKAKKGADTILDSTLSNYDFSKEINFTSTVPIITVEDPLETDEDVPVISEDRTVYVDDYTTFHFLEAQKIGKEVVPTQTKVVFTTNMEEALFDSKKVYTVFENTASRINEAGTGIANGMMFYQWLKGIVQDFTEEATQKDTFDKISDVTMIVPYLGNILNIGNDIRKGDFMGAVELGGVTILLEAIPELTLPVLIGLTIIEDELEKEQVSQTVYNVLDKRDEKWEEVYGFVKQQWWWMVHTQFETRILHAYQALNHQVEAIKANMTYQLANYRGNQEDKELLEKAIDDTLQSLYYAVDQAMHNIKRFLIQSSKSYLLNQMLPKTKEQLLAFDQQTLRNVNDFINKNQGVLGESLAKDLKKKVEKRLTSLPVFNLEDLPISEFEDLIHSHEIDIQDSEVLNIGVNNGKIQDLSGENTPLTLGENLHIVNGRDNQAVRLNNQLDSKLEIQSRPNIHFTAFEDFSISIWIRCSMLRNNRNRGQKYTIIQQFNKYGWQLAIQDSVFVWTLHDTFNNQIQLTSGSALTNKNYLLQNFWLHITVTNKRSEKSRLYINGVLQDQKDISVLGNCHPKEPILFSIQDNSDPNYFVRFEQFNVYRKALTDSEVNRLYWKYFEGSYLRDVWGERLTYNRDYYMQLSTLPGRGIKREYRTWSGFDYIILSELGTQKIPTHEVTYPKLYQGQKITIHSDGKNLEPHVKSNKNIRLKIDDFYIGVVNPFKLPEWRPESGAYVVTTYNHAEDLCLYFRTRSSSQSLYYGQLIMNDGRNKSLLNYTLKGSTYWIWSSAWYYENYNTSSKTAGNWYFIPVDEGWKED

SEQ ID NO: 116 - protein, 1281 aa, Artificial Sequence
  Synthetic polypeptide
MVTINDLHYSDPIDEDNIINMRIPLYDLEVDDQFINHNVPDLKAFQVFPNVWVVPERYTFYSTMKNLDAPANPSRSSYYDPTYLQSDAEKEVFLQQMILLFKRINSTQEGQQFLNLLSRSIPVPYESNGDVAMGTTQVIKQMDDKGNVLKHRRAHIIIYGPGPDLMAKGSKALTKSRETGRGCMAEIYFSPMYHKTYSTKLTNKNSLVDKSVQEFVPDPAVTLIHELCHGLHALYGIDLGNVGSWEFNSNPNSLFSSWFSSKEAVNFEEVMTFGGEDVKVIKSEIDKKIPGILNLIKTTVEPIINKITDPHDEMLQCLQSKYPSLKGTLGQFFFDDTQLEKDIRDLWMVMNETMFAENLKALTRARYLVPKVENIVQVDILSPNVYTIDKGFNHLSKGFKGQSVSQSYFRKISALARGAVVRACKSVIPRKGTKAPPRLCIEILEDDLFIMSSKDSFTDTDFSEPSVGPVSYKAKKGADTILDSTLSNYDFSKEINFTSTVPIITVEDPLETDEDVPVISEDRTVYVDDYTTFHFLEAQKIGKEVVPTQTKVVFTTNMEEALFDSKKVYTVFENTASRINEAGTGIANGMMFYQWLKGIVQDFTEEATQKDTFDKISDVTMIVPYLGNILNIGNDIRKGDFMGAVELGGVTILLEAIPELTLPVLIGLTIIEDELEKEQVSQTVYNVLDKRDEKWEEVYGFVKQQWWWMVHTQFETRILHAYQALNHQVEAIKANMTYQLANYRGNQEDKELLEKAIDDTLQSLYYAVDQAMHNIKRFLIQSSKSYLLNQMLPKTKEQLLAFDQQTLRNVNDFINKNQGVLGESLAKDLKKKVEKRLTSLPVFNLEDLPISEFEDLIHSHEIDIQDSEVLNIGVNNGKIQDLSGENTPLTLGENLHIVNGRDNQAVRLNNQLDSKLEIQSRPNIHFTAFEDFSISIWIRCSMLRNNRNRGQKYTIIQQFNKYGWQLAIQDSVFVWTLHDTFNNQIQLTSGSALTNKNYLLQNFWLHITVTNKRSEKSRLYINGVLQDQKDISVLGNCHPKEPILFSIQDNSDPNYFVRFEQFNVYRKALTDSEVNRLYWKYFEGSYLRDVWGERLTYNRDYYMQLSTLPGRGIKREYRTWSGFDYIILSELGTQKIPTHEVTYPKLYQGQKITIHSDGKNLEPHVKSNKNIRLKIDDFYIGVVNPFKLPEWRPESGAYVVTTYNHAEDLCLYFRTRSSSQSLYYGQLIMNDGRNKSLLNYTLKGSTYWIWSSAWYYENYNTSSKTAGNWYFIPVDEGWKED

SEQ ID NO: 117 - protein, 1279 aa, Artificial Sequence
  Synthetic polypeptide
MVTINDLHYSDPIDEDNIINMRIPLYDLEVDDQFINHNVPDLKAFQVFPNVWVVPERYTFYSTMKNLDAPANPSRSSYYDPTYLQSDAEKEVFLQQMILLFKRINSTQEGQQFLNLLSRSIPVPYESNGDVAMGTTQVIKQMDDKGNVLKHRRAHIIIYGPGPDLMAKGSKALTKSRETGRGCMAEIYFSPMYHKTYSTKLTNKNSLVDKSVQEFVPDPAVTLIHELCHGLHALYGIDLGNVGSWEFNSNPNSLFSSWFSSKEAVNFEEVMTFGGEDVKVIKSEIDKKIPGILNLIKTTVEPIINKITDPHDEMLQCLQSKYPSLKGTLGQFFFDDTQLEKDIRDLWMVMNETMFAENLKALTRARYLVPKVENIVQVDILSPNVYTIDKGFNHLSKGFKGQSVSQSYFRKISALARGAVVRACKPVMYKNTGKSEQCIEILEDDLFIMSSKDSFTDTDFSEPSVGPVSYKAKKGADTILDSTLSNYDFSKEINFTSTVPIITVEDPLETDEDVPVISEDRTVYVDDYTTFHFLEAQKIGKEVVPTQTKVVFTTNMEEALFDSKKVYTVFENTASRINEAGTGIANGMMFYQWLKGIVQDFTEEATQKDTFDKISDVTMIVPYLGNILNIGNDIRKGDFMGAVELGGVTILLEAIPELTLPVLIGLTIIEDELEKEQVSQTVYNVLDKRDEKWEEVYGFVKQQWWWMVHTQFETRILHAYQALNHQVEAIKANMTYQLANYRGNQEDKELLEKAIDDTLQSLYYAVDQAMHNIKRFLIQSSKSYLLNQMLPKTKEQLLAFDQQTLRNVNDFINKNQGVLGESLAKDLKKKVEKRLTSLPVFNLEDLPISEFEDLIHSHEIDIQDSEVLNIGVNNGKIQDLSGENTPLTLGENLHIVNGRDNQAVRLNNQLDSKLEIQSRPNIHFTAFEDFSISIWIRCSMLRNNRNRGQKYTIIQQFNKYGWQLAIQDSVFVWTLHDTFNNQIQLTSGSALTNKNYLLQNFWLHITVTNKRSEKSRLYINGVLQDQKDISVLGNCHPKEPILFSIQDNSDPNYFVRFEQFNVYRKALTDSEVNRLYWKYFEGSYLRDVWGERLTYNRDYYMQLSTLPGRGIKREYRTWSGFDYIILSELGTQKIPTHEVTYPKLYQGQKITIHSDGKNLEPHVKSNKNIRLKIDDFYIGVVNPFKLPEWRPESGAYVVTTYNHAEDLCLYFRTRSSSQSLYYGQLIMNDGRNKSLLNYTLKGSTYWIWSSAWYYENYNTSSKTAGNWYFIPVDEGWKED

SEQ ID NO: 118 - protein, 1309 aa, Artificial Sequence
  Synthetic polypeptide
MVTINDLHYSDPIDEDNIINMRIPLYDLEVDDQFINHNVPDLKAFQVFPNVWVVPERYTFYSTMKNLDAPANPSRSSYYDPTYLQSDAEKEVFLQQMILLFKRINSTQEGQQFLNLLSRSIPVPYESNGDVAMGTTQVIKQMDDKGNVLKHRRAHIIIYGPGPDLMAKGSKALTKSRETGRGCMAEIYFSPMYHKTYSTKLTNKNSLVDKSVQEFVPDPAVTLIHELCHGLHALYGIDLGNVGSWEFNSNPNSLFSSWFSSKEAVNFEEVMTFGGEDVKVIKSEIDKKIPGILNLIKTTVEPIINKITDPHDEMLQCLQSKYPSLKGTLGQFFFDDTQLEKDIRDLWMVMNETMFAENLKALTRARYLVPKVENIVQVDILSPNVYTIDKGFNHLSKGFKGQSVSQSYFRKISALARGAVVRACPRNGLLYNAIYRNSKNYLNNIDLEDKKTTSKTNVSYPCSLLNGCIEILEDDLFIMSSKDSFTDTDFSEPSVGPVSYKAKKGADTILDSTLSNYDFSKEINFTSTVPIITVEDPLETDEDVPVISEDRTVYVDDYTTFHFLEAQKIGKEVVPTQTKVVFTTNMEEALFDSKKVYTVFENTASRINEAGTGIANGMMFYQWLKGIVQDFTEEATQKDTFDKISDVTMIVPYLGNILNIGNDIRKGDFMGAVELGGVTILLEAIPELTLPVLIGLTIIEDELEKEQVSQTVYNVLDKRDEKWEEVYGFVKQQWWWMVHTQFETRILHAYQALNHQVEAIKANMTYQLANYRGNQEDKELLEKAIDDTLQSLYYAVDQAMHNIKRFLIQSSKSYLLNQMLPKTKEQLLAFDQQTLRNVNDFINKNQGVLGESLAKDLKKKVEKRLTSLPVFNLEDLPISEFEDLIHSHEIDIQDSEVLNIGVNNGKIQDLSGENTPLTLGENLHIVNGRDNQAVRLNNQLDSKLEIQSRPNIHFTAFEDFSISIWIRCSMLRNNRNRGQKYTIIQQFNKYGWQLAIQDSVFVWTLHDTFNNQIQLTSGSALTNKNYLLQNFWLHITVTNKRSEKSRLYINGVLQDQKDISVLGNCHPKEPILFSIQDNSDPNYFVRFEQFNVYRKALTDSEVNRLYWKYFEGSYLRDVWGERLTYNRDYYMQLSTLPGRGIKREYRTWSGFDYIILSELGTQKIPTHEVTYPKLYQGQKITIHSDGKNLEPHVKSNKNIRLKIDDFYIGVVNPFKLPEWRPESGAYVVTTYNHAEDLCLYFRTRSSSQSLYYGQLIMNDGRNKSLLNYTLKGSTYWIWSSAWYYENYNTSSKTAGNWYFIPVDEGWKED

SEQ ID NO: 119 - protein, 1286 aa, Artificial Sequence
  Synthetic polypeptide
MVTINDLHYSDPIDEDNIINMRIPLYDLEVDDQFINHNVPDLKAFQVFPNVWVVPERYTFYSTMKNLDAPANPSRSSYYDPTYLQSDAEKEVFLQQMILLFKRINSTQEGQQFLNLLSRSIPVPYESNGDVAMGTTQVIKQMDDKGNVLKHRRAHIIIYGPGPDLMAKGSKALTKSRETGRGCMAEIYFSPMYHKTYSTKLTNKNSLVDKSVQEFVPDPAVTLIHELCHGLHALYGIDLGNVGSWEFNSNPNSLFSSWFSSKEAVNFEEVMTFGGEDVKVIKSEIDKKIPGILNLIKTTVEPIINKITDPHDEMLQCLQSKYPSLKGTLGQFFFDDTQLEKDIRDLWMVMNETMFAENLKALTRARYLVPKVENIVQVDILSPNVYTIDKGFNHLSKGFKGQSVSQSYFRKISALARGAVVRACPNPHFSSQRGLSSCIEILEDDLFIMSSKDSFTDTDFSEPSVGPVSYKAKKGADTILDSTLSNYDFSKEINFTSTVPIITVEDPLETDEDVPVISEDRTVYVDDYTTFHFLEAQKIGKEVVPTQTKVVFTTNMEEALFDSKKVYTVFENTASRINEAGTGIANGMMFYQWLKGIVQDFTEEATQKDTFDKISDVTMIVPYLGNILNIGNDIRKGDFMGAVELGGVTILLEAIPELTLPVLIGLTIIEDELEKEQVSQTVYNVLDKRDEKWEEVYGFVKQQWWWMVHTQFETRILHAYQALNHQVEAIKANMTYQLANYRGNQEDKELLEKAIDDTLQSLYYAVDQAMHNIKRFLIQSSKSYLLNQMLPKTKEQLLAFDQQTLRNVNDFINKNQGVLGESLAKDLKKKVEKRLTSLPVFNLEDLPISEFEDLIHSHEIDIIINTSILNLRYESNHLIDLSRYASKINIGSKVNFDPIDKNQIQLFNLESSKIEVILKNAIVYNSMYENFSTSFWIRIPKYFNSISLNNEYTIINCMENNSGWKVSLNYGEIIWTLQDTQEIKQRVVFKYSQMINISDYINRWIFVTITNNRLNNSKIYINGRLIDQKPISNLGNIHASNNIMFKLDGCRDTHRYIWIKYFNLFDKELNEKEIKDLYDNQSNSGILKDFWGDYLQYDKPYYMLNLYDPNKYVDVNNVGIRGYMYLKGPRGSVMTTNIYLNSSLYRGTKFIIKKYASGNKDNIVRNNDRVYINVVVKNKEYRLATNASQAGVEKILSALEIPDVGNLSQVVVMKSKNDQGITNKCKMNLQDNNGNDIGFIGFHQFNNIAKLVASNWYNRQIERSSRTLGCSWEFIPVDDGWGERPL

SEQ ID NO: 120 - protein, 1294 aa, Artificial Sequence
  Synthetic polypeptide
MVTINDLHYSDPIDEDNIINMRIPLYDLEVDDQFINHNVPDLKAFQVFPNVWVVPERYTFYSTMKNLDAPANPSRSSYYDPTYLQSDAEKEVFLQQMILLFKRINSTQEGQQFLNLLSRSIPVPYESNGDVAMGTTQVIKQMDDKGNVLKHRRAHIIIYGPGPDLMAKGSKALTKSRETGRGCMAEIYFSPMYHKTYSTKLTNKNSLVDKSVQEFVPDPAVTLIHELCHGLHALYGIDLGNVGSWEFNSNPNSLFSSWFSSKEAVNFEEVMTFGGEDVKVIKSEIDKKIPGILNLIKTTVEPIINKITDPHDEMLQCLQSKYPSLKGTLGQFFFDDTQLEKDIRDLWMVMNETMFAENLKALTRARYLVPKVENIVQVDILSPNVYTIDKGFNHLSKGFKGQSVSQSYFRKISALARGAVVRACPNPHFSSQRGLSSCIEILEDDLFIMSSKDSFTDTDFSEPSVGPVSYKAKKGADTILDSTLSNYDFSKEINFTSTVPIITVEDPLETDEDVPVISEDRTVYVDDYTTFHFLEAQKIGKEVVPTQTKVVFTTNMEEALFDSKKVYTVFENTASRINEAGTGIANGMMFYQWLKGIVQDFTEEATQKDTFDKISDVTMIVPYLGNILNIGNDIRKGDFMGAVELGGVTILLEAIPELTLPVLIGLTIIEDELEKEQVSQTVYNVLDKRDEKWEEVYGFVKQQWWWMVHTQFETRILHAYQALNHQVEAIKANMTYQLANYRGNQEDKELLEKAIDDTLQSLYYAVDQAMHNIKRFLIQSSKSYLLNQMLPKTKEQLLAFDQQTLRNVNDFINKNQGVLGESLAKDLKKKVEKRLTSLPVFNLEDLPISEFEDLIHSHEIDIILNNIILNLRYKDNNLIDLSGYGAKVEVYDGVELNDKNQFKLTSSANSKIRVTQNQNIIFNSVFLDFSVSFWIRIPKYKNDGIQNYIHNEYTIINCMKNNSGWKISIRGNRIIWTLIDINGKTKSVFFEYNIREDISEYINRWFFVTITNNLNNAKIYINGKLESNTDIKDIREVIANGEIIFKLDGDIDRTQFIWMKYFSIFNTELSQSNIEERYKIQSYSEYLKDFWGNPLMYNKEYYMFNAGNKNSYIKLKKDSPVGEILTRSKYNQNSKYINYRDLYIGEKFIIRRKSNSQSINDDIVRKEDYIYLDFFNLNQEWRVYTYKYFKKEEEKLFLAPISDSDEFYNTIQIKEYDEQPTYSCQLLFKKDEESTDEIGLIGIHRFYESGIVFEEYKDYFCISKWYLKEVKRKPYNLKLGCNWQFIPKDEGWTE

SEQ ID NO: 121 - protein, 1286 aa, Artificial Sequence
  Synthetic polypeptide
MVTINDLHYSDPIDEDNIINMRIPLYDLEVDDQFINHNVPDLKAFQVFPNVWVVPERYTFYSTMKNLDAPANPSRSSYYDPTYLQSDAEKEVFLQQMILLFKRINSTQEGQQFLNLLSRSIPVPYESNGDVAMGTTQVIKQMDDKGNVLKHRRAHIIIYGPGPDLMAKGSKALTKSRETGRGCMAEIYFSPMYHKTYSTKLTNKNSLVDKSVQEFVPDPAVTLIHELCHGLHALYGIDLGNVGSWEFNSNPNSLFSSWFSSKEAVNFEEVMTFGGEDVKVIKSEIDKKIPGILNLIKTTVEPIINKITDPHDEMLQCLQSKYPSLKGTLGQFFFDDTQLEKDIRDLWMVMNETMFAENLKALTRARYLVPKVENIVQVDILSPNVYTIDKGFNHLSKGFKGQSVSQSYFRKISALARGAVVRACPNPHFSSQRGLSSCIEILEDDLFIMSSKDSFTDTDFSEPSVGPVSYKAKKGADTILDSTLSNYDFSKEINFTSTVPIITVEDPLETDEDVPVISEDRTVYVDDYTTFHFLEAQKIGKEVVPTQTKVVFTTNMEEALFDSKKVYTVFENTASRINEAGTGIANGMMFYQWLKGIVQDFTEEATQKDTFDKISDVTMIVPYLGNILNIGNDIRKGDFMGAVELGGVTILLEAIPELTLPVLIGLTIIEDELEKEQVSQTVYNVLDKRDEKWEEVYGFVKQQWWWMVHTQFETRILHAYQALNHQVEAIKANMTYQLANYRGNQEDKELLEKAIDDTLQSLYYAVDQAMHNIKRFLIQSSKSYLLNQMLPKTKEQLLAFDQQTLRNVNDFINKNQGVLGESLAKDLKKKVEKRLTSLPVFNLEDLPISEFEDLIHSHEIDIINDSKILSLQNRKNTLVDTSGYNAEVSEEGDVQLNPIFPFDFKLGSSGEDRGKVIVTQNENIVYNSMYESFSISFWIRINKWVSNLPGYTIIDSVKNNSGWSIGIISNFLVFTLKQNEDSEQSINFSYDISNNAPGYNKWFFVTVTNNMMGNMKIYINGKLIDTIKVKELTGINFSKTITFEINKIPDTGLITSDSDNINMWIRDFYIFAKELDGKDINILFNSLQYTNVVKDYWGNDLRYNKEYYMVNIDYLNRYMYANSRQIVFNTRRNNNDFNEGYKIIIKRIRGNTNDTRVRGGDILYFDMTINNKAYNLFMKNETMYADNHSTEDIYAIGLREQTKDINDNIIFQIQPMNNTYYYASQIFKSNFNGENISGICSIGTYRFRLGGDWYRHNYLVPTVKQGNYASLLESTSTHWGFVPVSE

SEQ ID NO: 122 - protein, 1276 aa, Artificial Sequence
  Synthetic polypeptide
MVTINDLHYSDPIDEDNIINMRIPLYDLEVDDQFINHNVPDLKAFQVFPNVWVVPERYTFYSTMKNLDAPANPSRSSYYDPTYLQSDAEKEVFLQQMILLFKRINSTQEGQQFLNLLSRSIPVPYESNGDVAMGTTQVIKQMDDKGNVLKHRRAHIIIYGPGPDLMAKGSKALTKSRETGRGCMAEIYFSPMYHKTYSTKLTNKNSLVDKSVQEFVPDPAVTLIHELCHGLHALYGIDLGNVGSWEFNSNPNSLFSSWFSSKEAVNFEEVMTFGGEDVKVIKSEIDKKIPGILNLIKTTVEPIINKITDPHDEMLQCLQSKYPSLKGTLGQFFFDDTQLEKDIRDLWMVMNETMFAENLKALTRARYLVPKVENIVQVDILSPNVYTIDKGFNHLSKGFKGQSVSQSYFRKISALARGAVVRACPNPHFSSQRGLSSCIEILEDDLFIMSSKDSFTDTDFSEPSVGPVSYKAKKGADTILDSTLSNYDFSKEINFTSTVPIITVEDPLETDEDVPVISEDRTVYVDDYTTFHFLEAQKIGKEVVPTQTKVVFTTNMEEALFDSKKVYTVFENTASRINEAGTGIANGMMFYQWLKGIVQDFTEEATQKDTFDKISDVTMIVPYLGNILNIGNDIRKGDFMGAVELGGVTILLEAIPELTLPVLIGLTIIEDELEKEQVSQTVYNVLDKRDEKWEEVYGFVKQQWWWMVHTQFETRILHAYQALNHQVEAIKANMTYQLANYRGNQEDKELLEKAIDDTLQSLYYAVDQAMHNIKRFLIQSSKSYLLNQMLPKTKEQLLAFDQQTLRNVNDFINKNQGVLGESLAKDLKKKVEKRLTSLPVFNLEDLPISEFEDLIHSHEIDIEDYEVLNLGAEDGKIKDLSGTTSDINIGSDIELADGRENKAIKIKGSENSTIKIAMNKYLRFSATDNFSISFWIKHPKPTNLLNNGIEYTLVENFNQRGWKISIQDSKLIWYLRDHNNSIKIVTPDYIAFNGWNLITITNNRSKGSIVYVNGSKIEEKDISSIWNTEVDDPIIFRLKNNRDTQAFTLLDQFSIYRKELNQNEVVKLYNYYFNSNYIRDIWGNPLQYNKKYYLQTQDKPGKGLIREYWSSFGYDYVILSDSKTITFPNNIRYGALYNGSKVLIKNSKKLDGLVRNKDFIQLEIDGYNMGISADRFNEDTNYIGTTYGTTHDLTTDFEIIQRQEKYRNYCQLKTPYNIFHKSGLMSTETSKPTFHDYRDWVYSSAWYFQNYENLNLRKHTKTNWYFIPKDEGWDED

SEQ ID NO: 123 - protein, 1290 aa, Artificial Sequence
  Synthetic polypeptide
MVTINDLHYSDPIDEDNIINMRIPLYDLEVDDQFINHNVPDLKAFQVFPNVWVVPERYTFYSTMKNLDAPANPSRSSYYDPTYLQSDAEKEVFLQQMILLFKRINSTQEGQQFLNLLSRSIPVPYESNGDVAMGTTQVIKQMDDKGNVLKHRRAHIIIYGPGPDLMAKGSKALTKSRETGRGCMAEIYFSPMYHKTYSTKLTNKNSLVDKSVQEFVPDPAVTLIHELCHGLHALYGIDLGNVGSWEFNSNPNSLFSSWFSSKEAVNFEEVMTFGGEDVKVIKSEIDKKIPGILNLIKTTVEPIINKITDPHDEMLQCLQSKYPSLKGTLGQFFFDDTQLEKDIRDLWMVMNETMFAENLKALTRARYLVPKVENIVQVDILSPNVYTIDKGFNHLSKGFKGQSVSQSYFRKISALARGAVVRACPNPHFSSQLVPRGSLSSCIEILEDDLFIMSSKDSFTDTDFSEPSVGPVSYKAKKGADTILDSTLSNYDFSKEINFTSTVPIITVEDPLETDEDVPVISEDRTVYVDDYTTFHFLEAQKIGKEVVPTQTKVVFTTNMEEALFDSKKVYTVFENTASRINEAGTGIANGMMFYQWLKGIVQDFTEEATQKDTFDKISDVTMIVPYLGNILNIGNDIRKGDFMGAVELGGVTILLEAIPELTLPVLIGLTIIEDELEKEQVSQTVYNVLDKRDEKWEEVYGFVKQQWWWMVHTQFETRILHAYQALNHQVEAIKANMTYQLANYRGNQEDKELLEKAIDDTLQSLYYAVDQAMHNIKRFLIQSSKSYLLNQMLPKTKEQLLAFDQQTLRNVNDFINKNQGVLGESLAKDLKKKVEKRLTSLPVFNLEDLPISEFEDLIHSHEIDIIINTSILNLRYESNHLIDLSRYASKINIGSKVNFDPIDKNQIQLFNLESSKIEVILKNAIVYNSMYENFSTSFWIRIPKYFNSISLNNEYTIINCMENNSGWKVSLNYGEIIWTLQDTQEIKQRVVFKYSQMINISDYINRWIFVTITNNRLNNSKIYINGRLIDQKPISNLGNIHASNNIMFKLDGCRDTHRYIWIKYFNLFDKELNEKEIKDLYDNQSNSGILKDFWGDYLQYDKPYYMLNLYDPNKYVDVNNVGIRGYMYLKGPRGSVMTTNIYLNSSLYRGTKFIIKKYASGNKDNIVRNNDRVYINVVVKNKEYRLATNASQAGVEKILSALEIPDVGNLSQVVVMKSKNDQGITNKCKMNLQDNNGNDIGFIGFHQFNNIAKLVASNWYNRQIERSSRTLGCSWEFIPVDDGWGERPL

SEQ ID NO: 124 - protein, 1298 aa, Artificial Sequence
  Synthetic polypeptide
MVTINDLHYSDPIDEDNIINMRIPLYDLEVDDQFINHNVPDLKAFQVFPNVWVVPERYTFYSTMKNLDAPANPSRSSYYDPTYLQSDAEKEVFLQQMILLFKRINSTQEGQQFLNLLSRSIPVPYESNGDVAMGTTQVIKQMDDKGNVLKHRRAHIIIYGPGPDLMAKGSKALTKSRETGRGCMAEIYFSPMYHKTYSTKLTNKNSLVDKSVQEFVPDPAVTLIHELCHGLHALYGIDLGNVGSWEFNSNPNSLFSSWFSSKEAVNFEEVMTFGGEDVKVIKSEIDKKIPGILNLIKTTVEPIINKITDPHDEMLQCLQSKYPSLKGTLGQFFFDDTQLEKDIRDLWMVMNETMFAENLKALTRARYLVPKVENIVQVDILSPNVYTIDKGFNHLSKGFKGQSVSQSYFRKISALARGAVVRACPNPHFSSQLVPRGSLSSCIEILEDDLFIMSSKDSFTDTDFSEPSVGPVSYKAKKGADTILDSTLSNYDFSKEINFTSTVPIITVEDPLETDEDVPVISEDRTVYVDDYTTFHFLEAQKIGKEVVPTQTKVVFTTNMEEALFDSKKVYTVFENTASRINEAGTGIANGMMFYQWLKGIVQDFTEEATQKDTFDKISDVTMIVPYLGNILNIGNDIRKGDFMGAVELGGVTILLEAIPELTLPVLIGLTIIEDELEKEQVSQTVYNVLDKRDEKWEEVYGFVKQQWWWMVHTQFETRILHAYQALNHQVEAIKANMTYQLANYRGNQEDKELLEKAIDDTLQSLYYAVDQAMHNIKRFLIQSSKSYLLNQMLPKTKEQLLAFDQQTLRNVNDFINKNQGVLGESLAKDLKKKVEKRLTSLPVFNLEDLPISEFEDLIHSHEIDIILNNIILNLRYKDNNLIDLSGYGAKVEVYDGVELNDKNQFKLTSSANSKIRVTQNQNIIFNSVFLDFSVSFWIRIPKYKNDGIQNYIHNEYTIINCMKNNSGWKISIRGNRIIWTLIDINGKTKSVFFEYNIREDISEYINRWFFVTITNNLNNAKIYINGKLESNTDIKDIREVIANGEIIFKLDGDIDRTQFIWMKYFSIFNTELSQSNIEERYKIQSYSEYLKDFWGNPLMYNKEYYMFNAGNKNSYIKLKKDSPVGEILTRSKYNQNSKYINYRDLYIGEKFIIRRKSNSQSINDDIVRKEDYIYLDFFNLNQEWRVYTYKYFKKEEEKLFLAPISDSDEFYNTIQIKEYDEQPTYSCQLLFKKDEESTDEIGLIGIHRFYESGIVFEEYKDYFCISKWYLKEVKRKPYNLKLGCNWQFIPKDEGWTE

SEQ ID NO: 125 - protein, 1290 aa, Artificial Sequence
  Synthetic polypeptide
MVTINDLHYSDPIDEDNIINMRIPLYDLEVDDQFINHNVPDLKAFQVFPNVWVVPERYTFYSTMKNLDAPANPSRSSYYDPTYLQSDAEKEVFLQQMILLFKRINSTQEGQQFLNLLSRSIPVPYESNGDVAMGTTQVIKQMDDKGNVLKHRRAHIIIYGPGPDLMAKGSKALTKSRETGRGCMAEIYFSPMYHKTYSTKLTNKNSLVDKSVQEFVPDPAVTLIHELCHGLHALYGIDLGNVGSWEFNSNPNSLFSSWFSSKEAVNFEEVMTFGGEDVKVIKSEIDKKIPGILNLIKTTVEPIINKITDPHDEMLQCLQSKYPSLKGTLGQFFFDDTQLEKDIRDLWMVMNETMFAENLKALTRARYLVPKVENIVQVDILSPNVYTIDKGFNHLSKGFKGQSVSQSYFRKISALARGAVVRACPNPHFSSQLVPRGSLSSCIEILEDDLFIMSSKDSFTDTDFSEPSVGPVSYKAKKGADTILDSTLSNYDFSKEINFTSTVPIITVEDPLETDEDVPVISEDRTVYVDDYTTFHFLEAQKIGKEVVPTQTKVVFTTNMEEALFDSKKVYTVFENTASRINEAGTGIANGMMFYQWLKGIVQDFTEEATQKDTFDKISDVTMIVPYLGNILNIGNDIRKGDFMGAVELGGVTILLEAIPELTLPVLIGLTIIEDELEKEQVSQTVYNVLDKRDEKWEEVYGFVKQQWWWMVHTQFETRILHAYQALNHQVEAIKANMTYQLANYRGNQEDKELLEKAIDDTLQSLYYAVDQAMHNIKRFLIQSSKSYLLNQMLPKTKEQLLAFDQQTLRNVNDFINKNQGVLGESLAKDLKKKVEKRLTSLPVFNLEDLPISEFEDLIHSHEIDIINDSKILSLQNRKNTLVDTSGYNAEVSEEGDVQLNPIFPFDFKLGSSGEDRGKVIVTQNENIVYNSMYESFSISFWIRINKWVSNLPGYTIIDSVKNNSGWSIGIISNFLVFTLKQNEDSEQSINFSYDISNNAPGYNKWFFVTVTNNMMGNMKIYINGKLIDTIKVKELTGINFSKTITFEINKIPDTGLITSDSDNINMWIRDFYIFAKELDGKDINILFNSLQYTNVVKDYWGNDLRYNKEYYMVNIDYLNRYMYANSRQIVFNTRRNNNDFNEGYKIIIKRIRGNTNDTRVRGGDILYFDMTINNKAYNLFMKNETMYADNHSTEDIYAIGLREQTKDINDNIIFQIQPMNNTYYYASQIFKSNFNGENISGICSIGTYRFRLGGDWYRHNYLVPTVKQGNYASLLESTSTHWGFVPVSE

SEQ ID NO: 126 - protein, 1280 aa, Artificial Sequence
  Synthetic polypeptide
MVTINDLHYSDPIDEDNIINMRIPLYDLEVDDQFINHNVPDLKAFQVFPNVWVVPERYTFYSTMKNLDAPANPSRSSYYDPTYLQSDAEKEVFLQQMILLFKRINSTQEGQQFLNLLSRSIPVPYESNGDVAMGTTQVIKQMDDKGNVLKHRRAHIIIYGPGPDLMAKGSKALTKSRETGRGCMAEIYFSPMYHKTYSTKLTNKNSLVDKSVQEFVPDPAVTLIHELCHGLHALYGIDLGNVGSWEFNSNPNSLFSSWFSSKEAVNFEEVMTFGGEDVKVIKSEIDKKIPGILNLIKTTVEPIINKITDPHDEMLQCLQSKYPSLKGTLGQFFFDDTQLEKDIRDLWMVMNETMFAENLKALTRARYLVPKVENIVQVDILSPNVYTIDKGFNHLSKGFKGQSVSQSYFRKISALARGAVVRACPNPHFSSQLVPRGSLSSCIEILEDDLFIMSSKDSFTDTDFSEPSVGPVSYKAKKGADTILDSTLSNYDFSKEINFTSTVPIITVEDPLETDEDVPVISEDRTVYVDDYTTFHFLEAQKIGKEVVPTQTKVVFTTNMEEALFDSKKVYTVFENTASRINEAGTGIANGMMFYQWLKGIVQDFTEEATQKDTFDKISDVTMIVPYLGNILNIGNDIRKGDFMGAVELGGVTILLEAIPELTLPVLIGLTIIEDELEKEQVSQTVYNVLDKRDEKWEEVYGFVKQQWWWMVHTQFETRILHAYQALNHQVEAIKANMTYQLANYRGNQEDKELLEKAIDDTLQSLYYAVDQAMHNIKRFLIQSSKSYLLNQMLPKTKEQLLAFDQQTLRNVNDFINKNQGVLGESLAKDLKKKVEKRLTSLPVFNLEDLPISEFEDLIHSHEIDIEDYEVLNLGAEDGKIKDLSGTTSDINIGSDIELADGRENKAIKIKGSENSTIKIAMNKYLRFSATDNFSISFWIKHPKPTNLLNNGIEYTLVENFNQRGWKISIQDSKLIWYLRDHNNSIKIVTPDYIAFNGWNLITITNNRSKGSIVYVNGSKIEEKDISSIWNTEVDDPIIFRLKNNRDTQAFTLLDQFSIYRKELNQNEVVKLYNYYFNSNYIRDIWGNPLQYNKKYYLQTQDKPGKGLIREYWSSFGYDYVILSDSKTITFPNNIRYGALYNGSKVLIKNSKKLDGLVRNKDFIQLEIDGYNMGISADRFNEDTNYIGTTYGTTHDLTTDFEIIQRQEKYRNYCQLKTPYNIFHKSGLMSTETSKPTFHDYRDWVYSSAWYFQNYENLNLRKHTKTNWYFIPKDEGWDED

SEQ ID NO: 127 - protein, 1296 aa, Artificial Sequence
  Synthetic polypeptide
MPFVNKQFNYKDPVNGVDIAYIKIPNAGQMQPVKAFKIHNKIWVIPERDTFTNPEEGDLNPPPEAKQVPVSYYDSTYLSTDNEKDNYLKGVTKLFERIYSTDLGRMLLTSIVRGIPFWGGSTIDTELKVIDTNCINVIQPDGSYRSEELNLVIIGPSADIIQFECKSFGHEVLNLTRNGYGSTQYIRFSPDFTFGFEESLEVDTNPLLGAGKFATDPAVTLAHELIHAGHRLYGIAINPNRVFKVNTNAYYEMSGLEVSFEELRTFGGHDAKFIDSLQENEFRLYYYNKFKDIASTLNKAKSIVGTTASLQYMKNVFKEKYLLSEDTSGKFSVDKLKFDKLYKMLTEIYTEDNFVKFFKVLNRKTYLNFDKAVFKINIVPKVNYTIYDGFNLRNTNLAANFNGQNTEINNMNFTKLKNFTGLFEFYKLLCVRGIITSKTKSLDKGYNKALNDLCIKVNNWDLFFSPSEDNFTNDLNKGEEITSDTNIEAAEENISLDLIQQYYLTFNFDNEPENISIENLSSDIIGQLELMPNIERFPNGKKYELDKYTMFHYLRAQEFEHGKSRIALTNSVNEALLNPSRVYTFFSSDYVKKVNKATEAAMFLGWVEQLVYDFTDETSEVSTTDKIADITIIIPYIGPALNIGNMLYKDDFVGALIFSGAVILLEFIPEIAIPVLGTFALVSYIANKVLTVQTIDNALSKRNEKWDEVYKYIVTNWLAKVNTQIDLIRKKMKEALENQAEATKAIINYQYNQYTEEEKNNINFNIDDLSSKLNESINKAMININKFLNQCSVSYLMNSMIPYGVKRLEDFDASLKDALLKYIYDNRGTLIGQVDRLKDKVNNTLSTDIPFQLSKYVDNQRLLSTFTEYIKNIINTSILNLRYESNHLIDLSRYASKINIGSKVNFDPIDKNQIQLFNLESSKIEVILKNAIVYNSMYENFSTSFWIRIPKYFNSISLNNEYTIINCMENNSGWKVSLNYGEIIWTLQDTQEIKQRVVFKYSQMINISDYINRWIFVTITNNRLNNSKIYINGRLIDQKPISNLGNIHASNNIMFKLDGCRDTHRYIWIKYFNLFDKELNEKEIKDLYDNQSNSGILKDFWGDYLQYDKPYYMLNLYDPNKYVDVNNVGIRGYMYLKGPRGSVMTTNIYLNSSLYRGTKFIIKKYASGNKDNIVRNNDRVYINVVVKNKEYRLATNASQAGVEKILSALEIPDVGNLSQVVVMKSKNDQGITNKCKMNLQDNNGNDIGFIGFHQFNNIAKLVASNWYNRQIERSSRTLGCSWEFIPVDDGWGERPL

SEQ ID NO: 128 - protein, 1296 aa, Artificial Sequence
  Synthetic polypeptide
MPFVNKQFNYKDPVNGVDIAYIKIPNAGQMQPVKAFKIHNKIWVIPERDTFTNPEEGDLNPPPEAKQVPVSYYDSTYLSTDNEKDNYLKGVTKLFERIYSTDLGRMLLTSIVRGIPFWGGSTIDTELKVIDTNCINVIQPDGSYRSEELNLVIIGPSADIIQFECKSFGHDVLNLTRNGYGSTQYIRFSPDFTFGFEESLEVDTNPLLGAGKFATDPAVTLAHELIHAEHRLYGIAINPNRVFKVNTNAYYEMSGLEVSFEELRTFGGHDAKFIDSLQENEFRLYYYNKFKDVASTLNKAKSIIGTTASLQYMKNVFKEKYLLSEDTSGKFSVDKLKFDKLYKMLTEIYTEDNFVNFFKVINRKTYLNFDKAVFRINIVPDENYTIKDGFNLKGANLSTNFNGQNTEINSRNFTRLKNFTGLFEFYKLLCVRGIIPFKTKSLDEGYNKALNDLCIKVNNWDLFFSPSEDNFTNDLDKVEEITADTNIEAAEENISLDLIQQYYLTFDFDNEPENISIENLSSDIIGQLEPMPNIERFPNGKKYELDKYTMFHYLRAQEFEHGDSRIILTNSAEEALLKPNVAYTFFSSKYVKKINKAVEAFMFLNWAEELVYDFTDETNEVTTMDKIADITIIVPYIGPALNIGNMLSKGEFVEAIIFTGVVAMLEFIPEYALPVFGTFAIVSYIANKVLTVQTINNALSKRNEKWDEVYKYTVTNWLAKVNTQIDLIREKMKKALENQAEATKAIINYQYNQYTEEEKNNINFNIDDLSSKLNESINSAMININKFLDQCSVSYLMNSMIPYAVKRLKDFDASVRDVLLKYIYDNRGTLVLQVDRLKDEVNNTLSADIPFQLSKYVDNKKLLSTFTEYIKNIVNTSILSIVYKKDDLIDLSRYGAKINIGDRVYYDSIDKNQIKLINLESSTIEVILKNAIVYNSMYENFSTSFWIKIPKYFSKINLNNEYTIINCIENNSGWKVSLNYGEIIWTLQDNKQNIQRVVFKYSQMVNISDYINRWIFVTITNNRLTKSKIYINGRLIDQKPISNLGNIHASNKIMFKLDGCRDPRRYIMIKYFNLFDKELNEKEIKDLYDSQSNSGILKDFWGNYLQYDKPYYMLNLFDPNKYVDVNNIGIRGYMYLKGPRGSVVTTNIYLNSTLYEGTKFIIKKYASGNEDNIVRNNDRVYINVVVKNKEYRLATNASQAGVEKILSALEIPDVGNLSQVVVMKSKDDQGIRNKCKMNLQDNNGNDIGFIGFHLYDNIAKLVASNWYNRQVGKASRTFGCSWEFIPVDDGWGESSL

SEQ ID NO: 129 - protein, 1292 aa, Artificial Sequence
  Synthetic polypeptide
MPFVNKPFNYRDPGNGVDIAYIKIPNAGQMQPVKAFKIHEGVWVIPERDTFTNPEEGDLNPPPEAKQVPVSYYDSTYLSTDNEKDNYLKGVIKLFDRIYSTGLGRMLLSFIVKGIPFWGGSTIDTELKVIDTNCINVIEPGGSYRSEELNLVITGPSADIIQFECKSFGHDVFNLTRNGYGSTQYIRFSPDFTFGFEESLEVDTNPLLGAGTFATDPAVTLAHELIHAAHRLYGIAINPNRVLKVKTNAYYEMSGLEVSFEELRTFGGNDTNFIDSLWQKKFSRDAYDNLQNIARILNEAKTIVGTTTPLQYMKNIFIRKYFLSEDASGKISVNKAAFKEFYRVLTRGFTELEFVNPFKVINRKTYLNFDKAVFRINIVPDENYTINEGFNLEGANSNGQNTEINSRNFTRLKNFTGLFEFYKLLCVRGIIPFKTKSLDEGYNKALNYLCIKVNNWDLFFSPSEDNFTNDLDKVEEITADTNIEAAEENISSDLIQQYYLTFDFDNEPENISIENLSSDIIGQLEPMPNIERFPNGKKYELDKYTMFHYLRAQEFEHGDSRIILTNSAEEALLKPNVAYTFFSSKYVKKINKAVEAVIFLSWAEELVYDFTDETNEVTTMDKIADITIIVPYIGPALNIGNMVSKGEFVEAILFTGVVALLEFIPEYSLPVFGTFAIVSYIANKVLTVQTINNALSKRNEKWDEVYKYTVTNWLAKVNTQIDLIREKMKKALENQAEATRAIINYQYNQYTEEEKNNINFNIDDLSSKLNRSINRAMININKFLDQCSVSYLMNSMIPYAVKRLKDFDASVRDVLLKYIYDNRGTLILQVDRLKDEVNNTLSADIPFQLSKYVNDKKLLSTFTEYIKNIVNTSILSIVYKKDDLIDLSRYGAKINIGDRVYYDSIDKNQIKLINLESSTIEVILKNAIVYNSMYENFSTSFWIKIPKYFSKINLNNEYTIINCIENNSGWKVSLNYGEIIWTLQDNKQNIQRVVFKYSQMVNISDYINRWMFVTITNNRLTKSKIYINGRLIDQKPISNLGNIHASNKIMFKLDGCRDPRRYIMIKYFNLFDKELNEKEIKDLYDSQSNPGILKDFWGNYLQYDKPYYMLNLFDPNKYVDVNNIGIRGYMYLKGPRGSVMTTNIYLNSTLYMGTKFIIKKYASGNEDNIVRNNDRVYINVVVKNKEYRLATNASQAGVEKILSALEIPDVGNLSQVVVMKSKDDQGIRNKCKMNLQDNNGNDIGFVGFHLYDNIAKLVASNWYNRQVGKASRTFGCSWEFIPVDDGWGESSL

SEQ ID NO: 130 - protein, 1296 aa, Artificial Sequence
  Synthetic polypeptide
MPLVNQQINYYDPVNGVDIAYIKIPNAGKMQPVKAFKIHNKVWVIPERDIFTNPEEVDLNPPPEAKQVPISYYDSAYLSTDNEKDNYLKGVIKLFERIYSTDLGRMLLISIVRGIPFWGGGKIDTELKVIDTNCINIIQLDDSYRSEELNLAIIGPSANIIESQCSSFRDDVLNLTRNGYGSTQYIRFSPDFTVGFEESLEVDTNPLLGAGKFAQDPAVALAHELIHAEHRLYGIAINTNRVFKVNTNAYYEMAGLEVSLEELITFGGNDAKFIDSLQKKEFSLYYYNKFKDIASTLNKAKSIVGTTASLQYMKNVFKEKYLLSEDATGKFLVDRLKFDELYKLLTEIYTEDNFVKFFKVLNRKTYLNFDKAVFKINIVPDVNYTIHDGFNLRNTNLAANFNGQNIEINNKNFDKLKNFTGLFEFYKLLCVRGIITSKTKSLDEGYNKALNELCIKVNNWDLFFSPSEDNFTNDLDKVEEITSDTNIEAAEENISLDLIQQYYLNFNFDNEPENTSIENLSSDIIGQLEPMPNIERFPNGKKYELNKYTMFHYLRAQEFKHSNSRIILTNSAKEALLKPNIVYTFFSSKYIKAINKAVEAVTFVNWIENLVYDFTDETNEVSTMDKIADITIVIPYIGPALNIGNMIYKGEFVEAIIFSGAVILLEIVPEIALPVLGTFALVSYVSNKVLTVQTIDNALSKRNEKWDEVYKYIVTNWLAIVNTQINLIREKMKKALENQAEATKAIINYQYNQYTEEEKNNINFNIDDLSSKLNESINSAMININKFLDQCSVSYLMNSMIPYAVKRLKDFDASVRDVLLKYIYDNRGTLIGQVNRLKDKVNNTLSADIPFQLSKYVDNKKLLSTFTEYIKNITNASILSIVYKDDDLIDLSRYGAEIYNGDKVYYNSIDKNQIRLINLESSTIEVILKKAIVYNSMYENFSTSFWIRIPKYFNSISLNNEYTIINCMENNSGWKVSLNYGEIIWTFQDTQEIKQRVVFKYSQMINISDYINRWIFVTITNNRITKSKIYINGRLIDQKPISNLGNIHASNKIMFKLDGCRDPHRYIVIKYFNLFDKELSEKEIKDLYDNQSNSGILKDFWGDYLQYDKSYYMLNLYDPNKYVDVNNVGIRGYMYLKGPRDNVMTTNIYLNSSLYMGTKFIIKKYASGNKDNIVRNNDRVYINVVVKNKEYRLATNASQAGVEKILSALEIPDVGNLSQVVVMKSKNDQGITNKCKMNLQDNNGNDIGFIGFHQFNNIAKLVASNWYNRQIERSSRTLGCSWEFIPVDDGWRERPL

SEQ ID NO: 131 - protein, 1296 aa, Artificial Sequence
  Synthetic polypeptide
MPFVNKQFNYKDPVNGVDIAYIKIPNAGQMQPVKAFKIHNKIWVIPERDTFTNPEEGDLNPPPEAKQVPVSYYDSTYLSTDNEKDNYLKGVTKLFERIYSTELGRMLLTSIVRGIPFWGGSTIDTELKVIDTNCINVIQPDGSYRSEELNLVIIGPSADIIQFECKSFGHDVLNLTRNGYGSTQYIRFSPDFTFGFEESLEVDTNPLLGAGKFATDPAVTLAHELIHAGHRLYGIAINPNRVFKVNTNAYYEMSGLEVSFEELRTFGEHDAKFIDSLQENEFRLYYYNKFKDIASTLNKAKSIVGTTASLQYMKNVFKEKYLLSEDTSGKFSVDKLKFDKLYKMLTEIYTEDNFVKFFKVLNRKTYLNFDKAVFKINIVPEVNYTIYDGFNLRNTNLAANFNGQNTEINNMNFTKLKNFTGLFEFYKLLCVRGIITSKTKSLDEGYNKALNDLCIKVNNWDLFFSPSEDNFTNDLNKGEEITSDTNIEAAEENISLDLIQQYYLTFNFDNEPENISIENLSSDIIGQLELMPNIERFPNGKKYELDKYTMFHYLRAQEFEHGKSRIVLTNSVNEALLNPSSVYTFFSSDYVRKVNKATEAAMFLGWVEQLVYDFTDETSEVSTTDKIADITIIIPYIGPALNIGNMLYKDDFVGALIFSGAVILLEFIPEIAIPVLGTFALVSYIANKVLTVQTIDNALSKRNEKWGEVYKYIVTNWLAKVNTQIDLIRKKMKEALENQAEATKAIINYQYNQYTEEEKNNINFNIGDLSSKLNDSINKAMININKFLNQCSVSYLMNSMIPYGVKRLEDFDASLKDALLKYIYDNRGTLIGQVDRLKDKVNNTLSTDIPFQLSKYVDNQRLLSTFTEYIKNIINTSILNLRYESNHLIDLSRYASEINIGSKVNFDPIDKNQIQLFNLESSKIEIILKNAIVYNSMYENFSTSFWIKIPKYFSKINLNNEYTIINCIENNSGWKVSLNYGEIIWTLQDNKQNIQRVVFKYSQMVAISDYINRWIFITITNNRLNNSKIYINGRLIDQKPISNLGNIHASNNIMFKLDGCRDPQRYIWIKYFNLFDKELNEKEIKDLYDNQSNSGILKDFWGNYLQYDKPYYMLNLYDPNKYVDVNNVGIRGYMYLKGPRGSIVTTNIYLNSSLYMGTKFIIKKYASGNKDNIVRNNDRVYINVVVKNKEYRLATNASQAGVEKILSVLEIPDVGNLSQVVVMKSKNDQGIRNKCKMNLQDNNGNDIGFIGFHQFNNIDKLVASNWYNRQIERSSRTFGCSWEFIPVDDGWGESPL

SEQ ID NO: 132 - protein, 1296 aa, Artificial Sequence
  Synthetic polypeptide
MPFVNKQFNYKDPVNGVDIAYIKIPNAGQMQPVKAFKIHNKIWVIPERDTFTNPEEGDLNPPPEAKQVPVSYYDSTYLSTDNEKDNYLKGVTKLFERIYSTDLGRMLLTSIVRGIPFWGGSTIDTELKVIDTNCINVIQPDGSYRSEELNLVIIGPSADIIQFECKSFGHEVLNLTRNGYGSTQYIRFSPDFTFGFEESLEVDTNPLLGAGKFATDPAVTLAHELIHAGHRLYGIAINPNRVFKVNTNAYYEMSGLEVSFEELRTFGGHDAKFIDSLQENEFRLYYYNKFKDIASTLNKAKSIVGTTASLQYMKNVFKEKYLLSEDTSGKFSVDKLKFDKLYKMLTEIYTEDNFVKFFKVLNRKTYLNFDKAVFKINIVPKVNYTIYDGFNLRNTNLAANFNGQNTEINNMNFAKLKNFTGLFEFYKLLCVRGIITSKTKSLDKGYNKALNDLCIKVNNWDLFFSPSEDNFTNDLNKGEEITSDTNIEAAEENISLDLIQQYYLTFNFDNEPENISIENLSSDIIGQLELMPNIERFPNGKKYELDKYTMFHYLSAQEFEHGKSRIDLTNSVNEALLNPSHVYTFFSSDYVKKVNKATEAAMFLGWVEQLVYDFTDETSEVSTTDKIADITIIIPYIGPALNIGNMLYKDDFVGALIFSGAVILLEFIPEIAIPVLGTFAIVSYIANKVLTVQTINNALSKRNEKWDEVYKYTVTNWLAKVNTQIDLIREKMKKALENQAEATKAIINYQYNQYTEEEKNNINFNIDDLSSKLNESINSAMININKFLDQCSVSYLMNSMIPYAVKRLKDFDASVRDVLLKYIYDNRGTLIGQVDRLKDKVNNTLSTDIPFQLSKYVDNQRLLSTFTEYIKNIINTSILSLRYENNHLIDLSRYASKINIGSRVNFDPIDKNQIQLFNLESSKIEVILKNAIVYNSMYENFSTSFWIKIPKYFSEISLNNEYTIINCIENNSGWKVSLNYGEIIWTLQDNKQNIQRVVFKYSQMVAISDYINRWIFITITNNRLTKSKIYINGRLIDQKPISNLGNIHASNKIMFKLDGCRDPRRYIMIKYFNLFDKELNEKEIKDLYDSQSNSGILKDFWGNYLQYDKPYYMLNLFDPNKYVDVNNVGIRGYMYLKGSRSTLLTTNIYLNSGLYMGTKFIIKKYASGNKDNIVRNNDRVYINVVVNNKEYRLATNASQAGVEKILSALEIPDIGNLSQVVVMKSKNDQGIRNKCKMNLQDNNGNDIGFIGFHKFNDIYKLVASNWYNRQIEISSRTFGCSWEFIPVDDGWGEKPL

SEQ ID NO: 133 - protein, 1296 aa, Artificial Sequence
  Synthetic polypeptide
MPFVNKQFNYKDPVNGVDIAYIKIPNAGQMQPVKAFKIHNKIWVIPERDIFTNPEEGDLNPPPEAKQVPVSYYDSTYLSTDNEKDNYLKGVTKLFERIYSTDLGRMLLTSIVRGIPFWGGSTIDTELKVIDTNCINVIQPDGSYRSEELNLVIIGPSADIINFECKSFGHDVLNLTRNGYGSTQYIRFSPDFTFGFEESLEVDTNPLLGAGKFAIDPAVTLAHELIHAGHRLYGIAINPNRVFKVNTNAYYEMSGLEVSFEELRTFGGHDAKFIDSLQENEFRLYYYNKFKEVASILNKAKSIIGTTASLQYMKNVFKEKYLLSEDTSGKFSVDKLRFDKLYKMLTEIYTEDNFVKFFKVLNRKTYLNFDKAVFKMNIVPEVNYTIYDGFNLRNTNLAANFNGQNTEINNMNFTKLKNFTGLFEFYKLLCVRGIITSKTKSLDEGYNKALNDLCIKVNNWDLFFSPSEDNFTNDLNKGEEITSDTNIEAAEENISSDLIQQYYLTFNFDNEPENISIENLSSDIIGQLELMPNIERFPNGKKYELDKYTMFHYLRAQEFEYGNSRIVLINSVNEALLNPSSVYTFFSSDYVKKANEATEAAMFLGWVEQLVYDFTDETSEVSTMDKIADITIIVPYIGPALNIGNMVYKKKFEEALIFSGAVILLEFVPEIVLPILGTFALVSYTSNKVLTVRTIDNALSKRNEKWEEVYKYIVTNWLAKVNTQINLIRKKMKEALENQAEATKAIINYQYNQYTEEEKNNINFNIGDLSSKLNDSINKAMININKFLDQCSVSYLMNSMIPQGVKQLKDFDTSLRDSLLKYIYDNRGTLIGQVDRLKDKVNNTLSTDIPFQLSKYADNQRLLSTFTEYIKNIINTSILNLRYESNHLIDLSRYASKINIGSRVNFDPIDKNQIQLFNLESSKIEVILKNAIVYNSMYENFSTSFWIKIPKYFSKINLNNEYTIINCIENNSGWKVSLNYGEIIWTLQDNEQNIQRVVFKYSQMVNISDYINRWIFVTITNNRLTKSKIYINGRLIDQKPISNLGNIHASNKIMFKLDGCRDPHRYILIKYFNLFDKELNEKEIKDLYDNQSNSGILKDFWGDYLQYDKPYYMLNLYDPNKYIDVNNIGIRGYMYLKGPRGSVTTTNIYLNSMLYMGTKFIIKKHASGNKDNIVRNNDRVYINVLVKNKEYRLATNASQAGGEKILSAVEIPDVGNLSQVVVMKSKNDQGIRNKCKMNLQDNNGNDIGFIGFHQFNNIAKLVASNWYNRQIGKTSVTLGCSWELIPVDYGWGESSL

SEQ ID NO: 134 - protein, 1297 aa, Artificial Sequence
  Synthetic polypeptide
MPFVNKQFNYKDTVNGIDIAYIKIPNAGQMQPVKAFKIHNKIWVIPERDTFTNPKEGDLNPPPEAKQVPVSYYDSTYLSTDNEKDNYLKGVTKLFERIYSTDLGRMLLTSIVRGIPFWGGSTIDTELKVIDTNCINVIQPDGSYRSEELNLVIIGPSADIIQFECKSFGHDVLNLTRNGYGSTQYIRFSPDFTFGFEESLEVDTNPLLGAGKFATDPAVTLAHELIHAEHRLYGIAINPNRVFKVNTNAYYEMSGLEVSFEELRTFGGHNAKFIDSLQENEFRLYYYNKFKDIASTLNKAKSIVGTTASLQYMKNVFKEKYLLSEDTSGKFSVDKLKFDKLYKMLTEIYTEDNFVKFFKVLNRKTYLNFDKAVFKINIVPDENYTIKDGFNLKNTNLAANFNGQNTEINSRNFTKLKNFTGLFEFYKLLCVRGIIPFKTKSLDEGYNKALNDLCIKVNNWDLFFSPSEDNFTNDLDKVEEITSDTNIEAAEENISLDLIQQYYLTFDFDNEPENISIENLSSDIIGQLEPMPNIERFPNGKKYELDKYTMFHYLRAQEFEHSKSRIALTNSVNEALLNPSRVYTFFSSDYVKKVNKATEAAMFLGWVEQLVYDFTDETSEVSTTDKIADITIIIPYIGPALNIGNMLYKDDFVGALIFSGAVILLEFIPEIAIPVLGTFALVSYIANKVLTVQTIDNALSKRNEKWDEVYKYIVTNWLAKVNTQIDLVRKKMKEALENQAEATKAIINYQYNQYTEEEKNNINFNIDDLSSKLNESINSAMTNINKFLDQCSVSYLMNSMIPYAVKRLKDFDASVREVLLKYIYDNRGTLILQVDRLKDKVNNTLSADIPFQLSKYVDNKKLLSTFTEYIKNITNTSILSIVVDKDGRLIDLSRYGAEIYNGDKVSYNSIDKNQIKLINLESSAIEVILKNAIVYNSMYENFSTSFWIKIPKYFSKINLNNEYTIINCIENNSGWKVSLNYGEIIWTLQDNQQNIQRVVFKYSQMVNISDYINRWIFVTITNNRLDKSKIYINGRLIDQKPISNLGNIHASNNIMFKLDGCRDPRRYIVIKYFNLFDKELNEKEIKDLYDNQSNSGILKDFWGDYLQYDKPYYMLNLYDPNKYVDVNNIGIRGYMYLKGPRGSVVTTNIYLNSTLYMGTKFIIKKYASGNKDNIVRNNDRVYINVVVKNKEYRLATNALQAGVEKILSALEIPDVGNLSQVVVMKSKNDQGIRNKCKMNLQDNNGNDIGLIGFHQFNNIAKLVASNWYNRQVGKASRTFGCSWEFIPVDDGWGESSQ

SEQ ID NO: 135 - protein, 2571 aa, Artificial Sequence
  Synthetic polypeptide
MPITINNFNYSDPVDNKNILYLDTHLNTLANEPEKAFRITGNIWVIPDRFSRNSNPNLNKPPRVTSPKSGYYDPNYLSTDSDKDPFLKEIIKLFKRINSREIGEELIYRLSTDIPFPGNNNTPINTFDFDVDFNSVDVKTRQGNNWVKTGSINPSVIITGPRENIIDPETSTFKLTNNTFAAQEGFGALSIISISPRFMLTYSNATNDVGEGRFSKSEFCMDPILILMHELNHAMHNLYGIAIPNDQTISSVTSNIFYSQYNVKLEYAEIYAFGGPTIDLIPKSARKYFEEKALDYYRSIAKRLNSITTANPSSFNKYIGEYKQKLIRKYRFVVESSGEVTVNRNKFVELYNELTQIFTEFNYAKIYNVQNRKIYLSNVYTPVTANILDDNVYDIQNGFNIPKSNLNVLFMGQNLSRNPALRKVNPENMLYLFTKFCHKAIDGRSLYNKTLDCRELLVKNTDLPFIGDISDVKTDIFLRKDINEETEVIYYPDNVSVDQVILSKNTSEHGQLDLLYPSIDSESEILPGENQVFYDNRTQNVDYLNSYYYLESQKLSDNVEDFTFTRSIEEALDNSAKVYTYFPTLANKVNAGVQGGLFLMWANDVVEDFTTNILRKDTLDKISDVSAIIPYIGPALNISNSVRRGNFTEAFAVTGVTILLEAFPEFTIPALGAFVIYSKVQERNEIIKTIDNCLEQRIKRWKDSYEWMMGTWLSRIITQFNNISYQMYDSLNYQAGAIKAKIDLEYKKYSGSDKENIKSQVENLKNSLDVKISEAMNNINKFIRECSVTYLFKNMLPKVIDELNEFDRNTKAKLINLIDSHNIILVGEVDKLKAKVNNSFQNTIPFNIFSYTNNSLLKDIINEYFNNINDSKILSLQNRKNTLVDTSGYNAEVSEEGDVQLNPIFPFDFKLGSSGEDRGKVIVTQNENIVYNSMYESFSISFWIRINKWVSNLPGYTIIDSVKNNSGWSIGIISNFLVFTLKQNEDSEQSINFSYDISNNAPGYNKWFFVTVTNNMMGNMKIYINGKLIDTIKVKELTGINFSKTITFEINKIPDTGLITSDSDNINMWIRDFYIFAKELDGKDINILFNSLQYTNVVKDYWGNDLRYNKEYYMVNIDYLNRYMYANSRQIVFNTRRNNNDFNEGYKIIIKRIRGNTNDTRVRGGDILYFDMTINNKAYNLFMKNETMYADNHSTEDIYAIGLREQTKDINDNIIFQIQPMNNTYYYASQIFKSNFNGENISGICSIGTYRFRLGGDWYRHNYLVPTVKQGNYASLLESTSTHWGFVPVSEBNTDMTWPVKDFNYSDPVNDNDILYLRIPQNKLITTPVKAFMITQNIWVIPERFSSDTNPSLSKPPRPTSKYQSYYDPSYLSTDEQKDTFLKGIIKLFKRINERDIGKKLINYLVVGSPFMGDSSTPEDTFDFTRHTTNIAVEKFENGSWKVTNIITPSVLIFGPLPNILDYTASLTLQGQQSNPSFEGFGTLSILKVAPEFLLTFSDVTSNQSSAVLGKSIFCMDPVIALMHELTHSLHQLYGINIPSDKRIRPQVSEGFFSQDGPNVQFEELYTFGGLDVEIIPQIERSQLREKALGHYKDIAKRLNNINKTIPSSWISNIDKYKKIFSEKYNFDKDNTGNFVVNIDKFNSLYSDLTNVMSEVVYSSQYNVKNRTHYFSRHYLPVFANILDDNIYTIRDGFNLTNKGFNIENSGQNIERNPALQKLSSESVVDLFTKVCLRLTKNSRDDSTCIKVKNNRLPYVADKDSISQEIFENKIITDETNVQNYSDKFSLDESILDGQVPINPEIVDPLLPNVNMEPLNLPGEEIVFYDDITKYVDYLNSYYYLESQKLSNNVENITLTTSVEEALGYSNKIYTFLPSLAEKVNKGVQAGLFLNWANEVVEDFTTNIMKKDTLDKISDVSVIIPYIGPALNIGNSALRGNFNQAFATAGVAFLLEGFPEFTIPALGVFTFYSSIQEREKIIKTIENCLEQRVKRWKDSYQWMVSNWLSRITTQFNHINYQMYDSLSYQADAIKAKIDLEYKKYSGSDKENIKSQVENLKNSLDVKISEAMNNINKFIRECSVTYLFKNMLPKVIDELNKFDLRTKTELINLIDSHNIILVGEVDRLKAKVNESFENTMPFNIFSYTNNSLLKDIINEYFNSINDSKILSLQNKKNALVDTSGYNAEVRVGDNVQLNTIYTNDFKLSSSGDKIIVNLNNNILYSAIYENSSVSFWIKISKDLTNSHNEYTIINSIEQNSGWKLCIRNGNIEWILQDVNRKYKSLIFDYSESLSHTGYTNKWFFVTITNNIMGYMKLYINGELKQSQKIEDLDEVKLDKTIVFGIDENIDENQMLWIRDFNIFSKELSNEDINIVYEGQILRNVIKDYWGNPLKFDTEYYIINDNYIDRYIAPESNVLVLVQYPDRSKLYTGNPITIKSVSDKNPYSRILNGDNIILHMLYNSRKYMIIRDTDTIYATQGGECSQNCVYALKLQSNLGNYGIGIFSIKNIVSKNKYCSQIFSSFRENTMLLADIYKPWRFSFKNAYTPVAVTNYETKLLSTSSFWKFISRDPGWVE

SEQ ID NO: 136 - protein, 1252 aa, Artificial Sequence
  Synthetic polypeptide
MPKINSFNYNDPVNDRTILYIKPGGCQEFYKSFNIMKNIWIIPERNVIGTTPQDFHPPTSLKNGDSSYYDPNYLQSDEEKDRFLKIVTKIFNRINNNLSGGILLEELSKANPYLGNDNTPDNQFHIGDASAVEIKFSNGSQDILLPNVIIMGAEPDLFETNSSNISLRNNYMPSNHGFGSIAIVTFSPEYSFRFNDNSMNEFIQDPALTLMHELIHSLHGLYGAKGITTKYTITQKQNPLITNIRGTNIEEFLTFGGTDLNIITSAQSNDIYTNLLADYKKIASKLSKVQVSNPLLNPYKDVFEAKYGLDKDASGIYSVNINKFNDIFKKLYSFTEFDLATKFQVKCRQTYIGQYKYFKLSNLLNDSIYNISEGYNINNLKVNFRGQNANLNPRIITPITGRGLVKKIIRFCKNIVSVKGIRKSICIEINNGELFFVASENSYNDDNINTPKEIDDTVTSNNNYENDLDQVILNFNSESAPGLSDEKLNLTIQNDAYIPKYDSNGTSDIEQHDVNELNVFFYLDAQKVPEGENNVNLTSSIDTALLEQPKIYTFFSSEFINNVNKPVQAALFVSWIQQVLVDFTTEANQKSTVDKIADISIVVPYIGLALNIGNEAQKGNFKDALELLGAGILLEFEPELLIPTILVFTIKSFLGSSDNKNKVIKAINNALKERDEKWKEVYSFIVSNWMTKINTQFNKRKEQMYQALQNQVNAIKTIIESKYNSYTLEEKNELTNKYDIKQIENELNQKVSIAMNNIDRFLTESSISYLMKLINEVKINKLREYDENVKTYLLNYIIQHGSILGESQQELNSMVTDTLNNSIPFKLSSYTDDKILISYFNKFFKRIKSSSVLNMRYKNDKYVDTSGYDSNININGDVYKYPTNKNQFGIYNDKLSEVNISQNDYIIYDNKYKNFSISFWVRIPNYDNKIVNVNNEYTIINCMRDNNSGWKVSLNHNEIIWTLQDNAGINQKLAFNYGNANGISDYINKWIFVTITNDRLGDSKLYINGNLIDQKSILNLGNIHVSDNILFKIVNCSYTRYIGIRYFNIFDKELDETEIQTLYSNEPNTNILKDFWGNYLLYDKEYYLLNVLKPNNFIDRRKDSTLSINNIRSTILLANRLYSGIKVKIQRVNNSSTNDNLVRKNDQVYINFVASKTHLFPLYADTATTNKEKTIKISSSGNRFNQVVVMNSVGNNCTMNFKNNNGNNIGLLGFKADTVVASTWYYTHMRDHTNSNGCFWNFISEEHGWQEK

SEQ ID NO: 137 - protein, 1278 aa, Artificial Sequence
  Synthetic polypeptide
MPVVINSFNYNDPVNDDTILYMQIPYEEKSKKYYKAFEIMRNVWIIPERNTIGTDPSDFDPPASLENGSSAYYDPNYLTTDAEKDRYLKTTIKLFKRINSNPAGEVLLQEISYAKPYLGNEHTPINEFHPVTRTTSVNIKSSTNVKSSIILNLLVLGAGPDIFENSSYPVRKLMDSGGVYDPSNDGFGSINIVTFSPEYEYTFNDISGGYNSSTESFIADPAISLAHELIHALHGLYGARGVTYKETIKVKQAPLMIAEKPIRLEEFLTFGGQDLNIITSAMKEKIYNNLLANYEKIATRLSRVNSAPPEYDINEYKDYFQWKYGLDKNADGSYTVNENKFNEIYKKLYSFTEIDLANKFKVKCRNTYFIKYGFLKVPNLLDDDIYTVSEGFNIGNLAVNNRGQNIKLNPKIIDSIPDKGLVEKIVKFCKSVIPRKGTKAPPRLCIRVNNRELFFVASESSYNENDINTPKEIDDTTNLNNNYRNNLDEVILDYNSETIPQISNQTLNTLVQDDSYVPRYDSNGTSEIEEHNVVDLNVFFYLHAQKVPEGETNISLTSSIDTALSEESQVYTFFSSEFINTINKPVHAALFISWINQVIRDFTTEATQKSTFDKIADISLVVPYVGLALNIGNEVQKENFKEAFELLGAGILLEFVPELLIPTILVFTIKSFIGSSENKNKIIKAINNSLMERETKWKEIYSWIVSNWLTRINTQFNKRKEQMYQALQNQVDAIKTVIEYKYNNYTSDERNRLESEYNINNIREELNKKVSLAMENIERFITESSIFYLMKLINEAKVSKLREYDEGVKEYLLDYISEHRSILGNSVQELNDLVTSTLNNSIPFELSSYTNDKILILYFNKLYKKIKDNSILDMRYENNKFIDISGYGSNISINGDVYIYSTNRNQFGIYSSKPSEVNIAQNNDIIYNGRYQNFSISFWVRIPKYFNKVNLNNEYTIIDCIRNNNSGWKISLNYNKIIWTLQDTAGNNQKLVFNYTQMISISDYINKWIFVTITNNRLGNSRIYINGNLIDEKSISNLGDIHVSDNILFKIVGCNDTRYVGIRYFKVFDTELGKTEIETLYSDEPDPSILKDFWGNYLLYNKRYYLLNLLRTDKSITQNSNFLNINQQRGVYQKPNIFSNTRLYTGVEVIIRKNGSTDISNTDNFVRKNDLAYINVVDRDVEYRLYADISIAKPEKIIKLIRTSNSNNSLGQIIVMDSIGNNCTMNFQNNNGGNIGLLGFHSNNLVASSWYYNNIRKNTSSNGCFWSFISKEHGWQEN

SEQ ID NO: 138 - protein, 1297 aa, Artificial Sequence
  Synthetic polypeptide
  misc_feature (7)..(7): Xaa can be any naturally occurring amino acid
MPVNIKXFNYNDPINNDDIIMMEPFNDPGPGTYYKAFRIIDRIWIVPERFTYGFQPDQFNASTGVFSKDVYEYYDPTYLKTDAEKDKFLKTMIKLFNRINSKPSGQRLLDMIVDAIPYLGNASTPPDKFAANVANVSINKKIIQPGAEDQIKGLMTNLIIFGPGPVLSDNFTDSMIMNGHSPISEGFGARMMIRFCPSCLNVFNNVQENKDTSIFSRRAYFADPALTLMHELIHVLHGLYGIKISNLPITPNTKEFFMQHSDPVQAEELYTFGGHDPSVISPSTDMNIYNKALQNFQDIANRLNIVSSAQGSGIDISLYKQIYKNKYDFVEDPNGKYSVDKDKFDKLYKALMFGFTETNLAGEYGIKTRYSYFSEYLPPIKTEKLLDNTIYTQNEGFNIASKNLKTEFNGQNKAVNKEAYEEISLEHLVIYRIAMCKPVMYKNTGKSEQCIIVNNEDLFFIANKDSFSKDLAKAETIAYNTQNNTIENNFSIDQLILDNDLSSGIDLPNENTEPFTNFDDIDIPVYIKQSALKKIFVDGDSLFEYLHAQTFPSNIENLQLTNSLNDALRNNNKVYTFFSTNLVEKANTVVGASLFVNWVKGVIDDFTSESTQKSTIDKVSDVSIIIPYIGPALNVGNETAKENFKNAFEIGGAAILMEFIPELIVPIVGFFTLESYVGNKGHIIMTISNALKKRDQKWTDMYGLIVSQWLSTVNTQFYTIKERMYNALNNQSQAIEKIIEDQYNRYSEEDKMNINIDFNDIDFKLNQSINLAINNIDDFINQCSISYLMNRMIPLAVKKLKDFDDNLKRDLLEYIDTNELYLLDEVNILKSKVNRHLKDSIPFDLSLYTKDTILIQVFNNYISNISSNAILSLSYRGGRLIDSSGYGATMNVGSDVIFNDIGNGQFKLNNSENSNITAHQSKFVVYDSMFDNFSINFWVRTPKYNNNDIQTYLQNEYTIISCIKNDSGWKVSIKGNRIIWTLIDVNAKSKSIFFEYSIKDNISDYINKWFSITITNDRLGNANIYINGSLKKSEKILNLDRINSSNDIDFKLINCTDTTKFVWIKDFNIFGRELNATEVSSLYWIQSSTNTLKDFWGNPLRYDTQYYLFNQGMQNIYIKYFSKASMGETAPRTNFNNAAINYQNLYLGLRFIIKKASNSRNINNDNIVREGDYIYLNIDNISDESYRVYVLVNSKEIQTQLFLAPINDDPTFYDVLQIKKYYEKTTYNCQILCEKDTKTFGLFGIGKFVKDYGYVWDTYDNYFCISQWYLRRISENINKLRLGCNWQFIPVDEGWTE

SEQ ID NO: 139 - protein, 1288 aa, Artificial Sequence
  Synthetic polypeptide
MPVVINSFNYDDPVNDNTIIYIRPPYYETSNTYFKAFQIMDNVWIIPERYRLGIDPSLFNPPVSLKAGSDGYFDPNYLSTNTEKNKYLQIMIKLFKRINSKPAGQILLEEIKNAIPYLGNSYTQEEQFTTNNRTVSFNVKLANGNIVQQMANLIIWGPGPDLTTNKTGGIIYSPYQSMEATPYKDGFGSIMTVEFSPEYATAFNDISIASHSPSLFIKDPALILMHELIHVLHGLYGTYITEYKITPNVVQSYMKVTKPITSAEFLTFGGRDRNIVPQSIQSQLYNKVLSDYKRIASRLNKVNTATALINIDEFKNLYEWKYQFAKDSNGVYSVDLNKFEQLYKKIYSFTEFNLAYEFKIKTRLGYLAENFGPFYLPNLLDDSIYTEVDGFNIGALSINYQGQNIGSDINSIKKLQGQGVVSRVVRLCSNSNTKNSLCITVNNRDLFFIASQESYGENTINTYKEIDDTTTLDPSFEDILDKVILNFNEQVIPQMPNRNVSTDIQKDNYIPKYDYNRTDIIDSYEVGRNYNTFFYLNAQKFSPNESNITLTSSFDTGLLEGSKVYTFFSSDFINNINKPVQALLFIEWVKQVIRDFTTEATKTSTVDKLKDISLVVPYIGLALNIGDEIYKQHFAEAVELVGAGLLLEFSPEFLIPTLLIFTIKGYLTGSIRDKDKIIKTLDNALNVRDQKWKELYRWVVSKWLTTINTQFNKRKEQMYKALKNQATAIKKIIENKYNNYTTDEKSKIDSSYNINEIERTLNEKINLAMKNIEQFITESSIAYLINIINNETIQKLKSYDDLVRRYLLGYIRNHSSILGNSVEELNSKVNNHLDNGIPFELSSYTNDSLLIRYFNKNYGELKYNCILNIKYEMDRDKLVDSSGYRSRINIGTGVKFSEIDKNQVQLSNLESSKIEVILNNGVIYNSMYENFSTSFWIRIPKYFRNINNEYKIISCMQNNSGWEVSLNFSNMNSKIIWTLQDTEGIKKTVVFQYTQNINISDYINRWIFVTITNNRLSNSKIYINGRLINEESISDLGNIHASNNIMFKLDGCRDPHRYIWIKYFNLFDKELNKKEIKDLYDNQSNSGILKDFWGDYLQYDKPYYMLNLYDPNKYLDVNNVGIRGYMYLKGPRGRIVTTNIYLNSTLYMGTKFIIKKYASGNKDNIVRNNDRVYINVVVKNKEYRLATNASQAGVEKILSAVEIPDVGNLSQVVVMKSENDQGIRNKCKMNLQDNNGNDIGFIGFHQFNNIAKLVASNWYNRQIGKASRTFGCSWEFIPVDDGWGESSL

What is claimed is:

1. A method of producing a Botulinum neurotoxin (BoNT), the method comprising culturing a Bacillus cell comprising a nucleotide sequence encoding a BoNT, under conditions suitable for expressing the BoNT.

2. The method of claim 1, wherein the nucleotide sequence encoding the BoNT is operably linked to a promoter.

3. The method of claim 2, wherein the promoter is an inducible promoter.

4. The method of any one of claims 1-3, wherein the nucleotide sequence encoding the BoNT is in an expression vector.

5. The method of claim 4, wherein the expression vector is selected from the group consisting of: pHT01, pHT08, pHT09, pHT10, pHT43, pHT253, pHT254, pHT 255, pNZ8901, pNZ8902, pNZ8910, pNZ8911, pWH1520, pMM1522, pMM1525, pHIS1522, pHIS1525, pSTREP1525, pSTREPHIS1525, pC-His1622, pC-Strep1622, pN-His-TEV1622, pN-Strep-TEV1622, pN-StrepXa1622, pSTOP1622, p3STOP1623 hp, pC-HIS1623 hp, pN-His-TEV1623 hp, pSP-LipA-hp, pSP-YocH-hp, p3STOP1623-2RBShp, pC-STREP1623 hp, pN-STREP-Xa1623 hp, pN-STREP_TEV1623 hp, pMGBm19, pPT7, pPT7-SPlipA, pPconst1326, pBP26, pBP27, pBQ200, pGP380, pGP382, pGP886, pGP888, pGP1459, pGP1460, pGP1389, pBE-S, and pRB374.

6. The method of any one of claims 1-5, wherein the BoNT is fused to a fusion domain at the N- or C-terminus.

7. The method of claim 6, wherein the fusion domain is an affinity tag.

8. The method of claim 7, wherein the affinity tag is selected from the group consisting of: His6, GST, Avi, Strep, S, MBP, Sumo, FLAG, HA, Myc, SBP, E, Calmodulin, Softag 1, Softag 3, TC, V5, VSV, Xpress, Halo, and Fc.

9. The method of any one of claims 1-8, wherein the nucleotide sequence encoding the BoNT is codon optimized for expression in Bacillus.

10. The method of any one of claims 1-9, wherein the BoNT is selected from the group consisting of: BoNT/A, BoNT/B, BoNT/C, BoNT/D, BoNT/E, BoNT/F, BoNT/G, BoNT/X, BoNT/En, and variants thereof.

11. The method of any one of claims 1-10, wherein the BoNT is a catalytically inactive BoNT.

12. The method of any one of claims 1-11, wherein the BoNT is a full-length BoNT.

13. The method of any one of claims 1-9, wherein the BoNT is a chimeric BoNT.

14. The method of any one of claims 1-13, wherein the BoNT comprises an amino acid sequence that is at least 85%, at least 86%, at least 87%, at least 88%, at least 89%, at least 90%, at least 91%, at least 92%, at least 93%, at least 94%, at least 95%, at least 96%, at least 97%, at least 98%, at least 99%, or at least 99.5% identical to any one of SEQ ID NOs: 1-139.

15. The method of claim 14, wherein the BoNT comprises the amino acid sequence of any one of SEQ ID NOs: 1-139.

16. The method of any one of claims 1-15, further comprising delivering the nucleotide sequence encoding the BoNT into the Bacillus cell.

17. The method of claim 16, wherein the nucleotide sequence encoding the BoNT is delivered via transformation, transduction, conjugation, and electroporation.

18. The method of any one of claims 1-17, further comprising purifying the BoNT from the Bacillus cell.

19. The method of claim 18, wherein the BoNT is purified via affinity chromatography, ion exchange chromatography, size-exclusion chromatography, or combinations thereof.

20. The method of any one of claims 1-19, wherein the Bacillus cell is selected from the group consisting of: Bacillus subtilis, Bacillus megaterium, Bacillus anthracis, and Bacillus brevis.

21. The method of claim 20, wherein the Bacillus cell is a wild type cell.

22. The method of claim 20, wherein the Bacillus cell is an engineered cell.

23. The method of claim 22, wherein the Bacillus is a protease deficient Bacillus cell.

24. A Bacillus cell comprising a nucleotide sequence encoding a Botulinum neurotoxin (BoNT).

25. The Bacillus cell of claim 24, wherein the nucleotide sequence encoding the BoNT is operably linked to a promoter.

26. The Bacillus cell of claim 25, wherein the promoter is an inducible promoter.

27. The Bacillus cell of any one of claims 24-26, wherein the nucleotide sequence encoding the BoNT is in an expression vector.

28. The Bacillus cell of claim 27, wherein the expression vector is selected from the group consisting of: pHT01, pHT08, pHT09, pHT10, pHT43, pHT253, pHT254, pHT 255, pNZ8901, pNZ8902, pNZ8910, pNZ8911, pWH1520, pMM1522, pMM1525, pHIS1522, pHIS1525, pSTREP1525, pSTREPHIS1525, pC-His1622, pC-Strep1622, pN-His-TEV1622, pN-Strep-TEV1622, pN-StrepXa1622, pSTOP1622, p3STOP1623 hp, pC-HIS1623 hp, pN-His-TEV1623 hp, pSP-LipA-hp, pSP-YocH-hp, p3STOP1623-2RBShp, pC-STREP1623 hp, pN-STREP-Xa1623 hp, pN-STREP_TEV1623 hp, pMGBm19, pPT7, pPT7-SPlipA, pPconst1326, pBP26, pBP27, pBQ200, pGP380, pGP382, pGP886, pGP888, pGP1459, pGP1460, pGP1389, pBE-S, and pRB374.

29. The Bacillus cell of any one of claims 24-28, wherein the BoNT is fused to a fusion domain at the N- or C-terminus.

30. The Bacillus cell of any one of claim 29, wherein the fusion domain is an affinity tag.

31. The Bacillus cell of claim 30, wherein the affinity tag is selected from the group consisting of: His6, GST, Avi, Strep, S, MBP, Sumo, FLAG, HA, Myc, SBP, E, Calmodulin, Softag 1, Softag 3, TC, V5, VSV, Xpress, Halo, and Fc.

32. The Bacillus cell of any one of claims 24-31, wherein the nucleotide sequence encoding the BoNT is codon optimized for expression in Bacillus.

33. The Bacillus cell of any one of claims 24-32, wherein the BoNT is selected from the group consisting of: BoNT/A, BoNT/B, BoNT/C, BoNT/D, BoNT/E, BoNT/F, BoNT/G, BoNT/X, BoNT/En, and variants thereof.

34. The Bacillus cell of any one of claims 24-33, wherein the BoNT is a catalytically inactive BoNT.

35. The Bacillus cell of any one of claims 24-34, wherein the BoNT is a full-length BoNT.

36. The Bacillus cell of any one of claims 24-32, wherein the BoNT is a chimeric BoNT.

37. The Bacillus cell of any one of claims 24-36, wherein the BoNT comprises an amino acid sequence that is at least 85%, at least 86%, at least 87%, at least 88%, at least 89%, at least 90%, at least 91%, at least 92%, at least 93%, at least 94%, at least 95%, at least 96%, at least 97%, at least 98%, at least 99%, or at least 99.5% identical to any one of SEQ ID NOs: 1-139.

38. The Bacillus cell of claim 37, wherein the BoNT comprises the amino acid sequence of any one of SEQ ID NOs: 1-139.

39. The Bacillus cell of any one of claims 24-38, wherein the Bacillus cell is selected from the group consisting of: Bacillus subtilis, Bacillus megaterium, and Bacillus anthracis, and Bacillus brevis.

40. The method of claim 39, wherein the Bacillus cell is a wild type cell.

41. The method of claim 39, wherein the Bacillus cell is an engineered cell.

42. The method of claim 41, wherein the Bacillus is a protease deficient Bacillus cell.
